(19) United States
(12) Patent Application Publication
(10) Pub. No.: US 2018/0051057 A1
(43) Pub. Date: Feb. 22, 2018

(54) CYANOBACTERIA HAVING IMPROVED PHOTOSYNTHETIC ACTIVITY

(71) Applicant: Matrix Genetics, LLC, Seattle, WA (US)

(72) Inventors: James Roberts, Seattle, WA (US); Michael Carleton, Kirkland, WA (US); Jason W. Hickman, San Diego, CA (US); Damian Carrieri, Seattle, WA (US); Mark Heinnickel, Seattle, WA (US)

(21) Appl. No.: 15/511,602

(22) PCT Filed: Sep. 15, 2015
(86) PCT No.: PCT/US2015/050280

§ 371 Date: Mar. 15, 2017

Related U.S. Application Data
(60) Provisional application No. 62/050,694, filed on Sep. 15, 2014.

(51) Int. Cl. C07K 14/195; C12P 7/64

(52) U.S. Cl. CPC C07K 14/195; C12P 7/64

(57) ABSTRACT

This disclosure describes modified photosynthetic microorganisms, including Cyanobacteria, that have a reduced amount of a light harvesting protein (LHP) polypeptide and contain one or more introduced or overexpressed polynucleotides encoding one or more enzymes associated with lipid biosynthesis, and which are capable of producing increased amounts of fatty acids and/or synthesizing triglycerides.

### PRIORITY CLAIM

[0001] This application is a national stage application of international patent application No. PCT/US15/50280, entitled “Cyanobacteria Having Improved Photosynthetic Activity,” and filed Sep. 15, 2015, which claims priority to U.S. Provisional Patent Application No. 62/050,694, entitled “Cyanobacteria Having Improved Photosynthetic Activities,” and filed Sep. 15, 2014. PCT International Application No. PCT/US15/50280 and U.S. Provisional Application Ser. No. 62/050,694 are fully incorporated herein by reference in their entirety.

### SEQUENCE LISTING

[0002] The Sequence Listing associated with this application is provided in text format in lieu of a paper copy, and is hereby incorporated by reference into the specification. The name of the text file containing the Sequence Listing is M077-0019PCT_sequencelisting_ST25. The text file is about 671 KB, was created on Sept. 15, 2015, and is being submitted electronically via EFS-Web.

### BACKGROUND

[0003] Certain organisms can be utilized as a source of oil such as triglycerides in the production of biofuels. For example, algae naturally produce triglycerides as energy storage molecules, and certain biofuel-related technologies are presently focused on the use of algae as a feedstock for biofuels. Algae are photosynthetic organisms, and the use of triglyceride-producing organisms such as algae provides the ability to produce biodiesel from sunlight, water, CO₂, macronutrients, and micronutrients. Algae, however, cannot be readily genetically manipulated, and produce much less oil (i.e., triglycerides) under culture conditions than in the wild.

[0004] Like algae, Cyanobacteria obtain energy from photosynthesis, utilizing chlorophyll A and water to reduce CO₂. Certain Cyanobacteria can produce metabolites, such as carbohydrates, proteins, and fatty acids, from just sunlight, water CO₂, water, and inorganic salts. Unlike algae, Cyanobacteria can be genetically manipulated. For example, S. elongatus PCC 7942 (hereafter referred to as “S. elongatus PCC 7942”) is a genetically manipulable, oligotrophic Cyanobacterium that thrives in low nutrient level conditions, and in the wild accumulates fatty acids in the form of lipid membranes to about 4 to 8% by dry weight. Cyanobacteria express light harvesting protein (LHP), which collects photons (i.e., light energy) and channel their energy to the photosynthetic reaction centers. However, although these proteins are extremely efficient at harvesting light, their capacity to use light for photosynthesis is easily saturated.

[0005] Clearly, therefore, there is a need in the art for modified photosynthetic microorganisms, including Cyanobacteria, capable of performing improved photosynthetic activity and producing oil such as triglycerides, e.g., to be used as feedstock in the production of biofuels and/or various specialty chemicals.

### BRIEF SUMMARY

[0006] Embodiments of the present invention relate to the demonstration that photosynthetic microorganisms, including Cyanobacteria, can be modified to reduce expression of light harvesting proteins and unexpectedly increase photosynthetic activity. The modified Cyanobacteria can be cultured to produce carbon-containing compounds such as lipids and triglycerides. In certain embodiments, the modified photosynthetic microorganisms, e.g., Cyanobacteria, of the present invention can also comprise one or more polynucleotides encoding one or more enzymes associated with neutral lipid synthesis and lipid packaging protein.

[0007] In some embodiments, the present disclosure includes a cell culture comprising modified Cyanobacteria that have an enhanced level of photosynthetic activity as compared to corresponding wild-type Cyanobacteria, wherein the modified Cyanobacteria have a reduced amount of a light harvesting polypeptide as compared to a corresponding wild-type Cyanobacteria.

[0008] In some embodiments, the present disclosure includes a method for generating modified Cyanobacteria that comprises modifying one or more polynucleotides associated with light harvesting proteins of Cyanobacteria to generate the modified Cyanobacteria, wherein the modified cyanobacteria have an enhanced level of photosynthetic activity as compared to corresponding wild-type Cyanobacteria. In these embodiments and other embodiments, the present disclosure include a method for generating modified Cyanobacteria, comprising: culturing Cyanobacteria under a stress condition; and isolating modified Cyanobacteria that have an enhanced level of photosynthetic activity as compared to corresponding wild-type Cyanobacteria, wherein the stress condition comprises culturing under increased light, culturing in metronidazole containing growth media or both.

[0009] In some embodiments, the present disclosure includes a modified Cyanobacterium comprising a reduced amount of a light harvesting polypeptide as compared to a corresponding wild-type Cyanobacterium. In particular embodiments, the modified Cyanobacterium has reduced expression of one or more genes of light harvesting protein biosynthesis or transportation pathway as compared to the corresponding wild-type Cyanobacterium.

[0010] In some embodiments, the present disclosure includes a method for producing a carbon-containing compound, comprising: culturing modified Cyanobacteria comprising a reduced amount of a light harvesting polypeptide as compared to a corresponding wild-type Cyanobacteria to thereby produce a carbon-containing compound; and harvesting the carbon-containing compound, wherein the modified cyanobacteria have an enhanced level of photosynthetic activity as compared to the corresponding wild-type Cyanobacteria.

[0011] In particular embodiments of the modified Cyanobacteria/Cyanobacterium and the related cell culture as well as the methods, the modified Cyanobacteria/Cyanobacterium contain modulations of the nblA, rpaB, pbsB, pbsC, or Phycobiliprotein gene, individually or in various combinations, may produce and accumulate significantly reduced levels of LHP as compared to wild-type Cyanobacteria. In some instances, the photosynthetic activity is measured based on at least one of a growth rate, a level of oxygen evolution, or a biomass accumulation rate.

### BRIEF DESCRIPTION OF THE FIGURES

[0012] FIGS. 1A and 1B show a measurement of phycobilisomes, comparing wild-type to nblA overexpressor. Synechococcus PCC7942 wild type, PCC7942 with an exogenous nblA gene, uninduced or PCC7942 with an exogenous nblA gene, induced. Samples were collected at time zero (FIG. 1A) and at six hours (FIG. 1B) after induction of the nblA gene. Whole cells were examined by spectrophotometry, and absorbance as a function of wavelength was determined. The three major peaks represent absorption by chlorophyll A (at approximately 420 and 680 nm) and by phycobiliprotein (at approximately 630 nm). Induction of nblA caused a rapid decrease in light absorption by phycobiliprotein. Some reduction in the 680 nm chlorophyll A peak was also observed. These data show that phycobilisomes are reduced after modulated nblA expression, indicating that modulating nblA expression reduce phycobilisome abundance.

[0013] FIG. 2 shows a plasmid pTJ014 Del_cpcE that is used to create knockout mutations in the cpcE gene by replacing a portion of the gene with a sequence that provides kanamycin resistance. Homologous recombination of the plasmid with S. elongatus between the loci of SYNPCC7942_orf1053 (cpcA2) and Synpcc7942_orf1055 (cpcF) from S. elongatus localizes the kanamycin resistance gene within the cpcE gene.

[0014] FIG. 3 shows normalized absorbance spectra of a mutant created by deletion of cpcE relative to WT. The resultant mutation has a much lower absorbance at 620 nm, a wavelength at which phycocyanin characteristically absorbs. Absorbances were normalized by taking the absorbance value at each wavelength (A) and dividing by the absorbance value at 800 nm (A800) and subtracting 1 from that ratio.

[0015] FIG. 4 shows changes in chlorophyll, carotenoid, phycocyanin, and allophycocyanin levels in the cpcE knockout mutant relative to WT. Both strains grew in high light (500 μmol photons m⁻² s⁻¹) with 5% CO₂. Levels of the pigments in the WT are set as 100%. The total amount of these pigments (expressed as % of all dry cell matter) is written above each bar. The error bars indicate standard error. The cpcE knockout mutant has only about 10% of the phycocyanin present in the WT.

[0016] FIG. 5A shows growth of a WT strain and a strain with cpcE deleted in a high light chamber (500 μmol photons m⁻² s⁻¹) with 5% CO₂ for 72 hr. Growth was determined by optical density which was measured by absorbance at 750 nm. The strain with cpcE deleted grew faster than the WT strain.

[0017] FIG. 5B shows the biomass accumulate at 72 hr by measurement of dry weight (g of dry material/L of liquid culture). The error bars indicate standard error. The cpcE mutant had higher biomass.

[0018] FIGS. 6A and 6B show growth and biomass accumulation similar to FIGS. 5A and 5B but at increased light levels of 1000 μmol photons m⁻² s⁻¹) with 5% CO₂. Under greater light both strains grew faster and accumulated more biomass.

[0019] FIG. 7 shows oxygen evolution of the cpcE knockout mutant and WT at varying levels of light intensity. The error bars indicate standard error.

### DETAILED DESCRIPTION

### Definitions

[0020] Unless defined otherwise, all technical and scientific terms used herein have the same meaning as commonly understood by those of ordinary skill in the art to which the invention belongs. Although any methods and materials similar or equivalent to those described herein can be used in the practice or testing of the present invention, preferred methods and materials are described. For the purposes of the present invention, the following terms are defined below.

[0021] The articles “a” and “an” are used herein to refer to one or to more than one (i.e. to at least one) of the grammatical object of the article. By way of example, “an element” means one element or more than one element.

[0022] By “about” is meant a quantity, level, value, number, frequency, percentage, dimension, size, amount, weight or length that varies by as much as 30, 25, 20, 25, 10, 9, 8, 7, 6, 5, 4, 3, 2 or 1% to a reference quantity, level, value, number, frequency, percentage, dimension, size, amount, weight or length.

[0023] The term “biologically active fragment”, as applied to fragments of a reference polynucleotide or polypeptide sequence, refers to a fragment that has at least about 0.1, 0.5, 1, 2, 5, 10, 12, 14, 16, 18, 20, 22, 24, 26, 28, 30, 35, 40, 45, 50, 55, 60, 65, 70, 75, 80, 85, 90, 95, 96, 97, 98, 99, 100, 110, 120, 150, 200, 300, 400, 500, 600, 700, 800, 900, 1000% or more of the activity of a reference sequence. The term “reference sequence” refers generally to a nucleic acid coding sequence, or amino acid sequence, of any enzyme having a diacylglycerol acyltransferase activity, a phosphatidate phosphatase activity, and/or an acetyl-CoA carboxylase activity, as described herein (see, e.g., SEQ ID NOS:1-9).

[0024] Included within the scope of the present invention are biologically active fragments of at least about 18, 19, 20, 21, 22, 23, 24, 25, 26, 27, 28, 29, 30, 40, 50, 60, 70, 80, 90, 100, 120, 140, 160, 180, 200, 220, 240, 260, 280, 300, 320, 340, 360, 380, 400, 500, 600 or more contiguous nucleotides or amino acid residues in length, including all integers in between, which comprise or encode a polypeptide having an enzymatic activity of a reference polynucleotide or polypeptide. Representative biologically active fragments generally participate in an interaction, e.g., an intra-molecular or an inter-molecular interaction. An inter-molecular interaction can be a specific binding interaction or an enzymatic interaction. Examples of enzymatic interactions or activity include diacylglycerol acyltransferase activity, phosphatidate phosphatase activity, and/or acetyl-CoA carboxylase activity, as described herein.

[0025] By “coding sequence” is meant any nucleic acid sequence that contributes to the code for the polypeptide product of a gene. By contrast, the term “non-coding sequence” refers to any nucleic acid sequence that does not contribute to the code for the polypeptide product of a gene.

[0026] Throughout this specification, unless the context requires otherwise, the words “comprise”, “comprises” and “comprising” will be understood to imply the inclusion of a stated step or element or group of steps or elements but not the exclusion of any other step or element or group of steps or elements.

[0027] By “consisting of” is meant including, and limited to, whatever follows the phrase “consisting of.” Thus, the phrase “consisting of” indicates that the listed elements are required or mandatory, and that no other elements may be present.

[0028] By “consisting essentially of” is meant including any elements listed after the phrase, and limited to other elements that do not interfere with or contribute to the activity or action specified in the disclosure for the listed elements. Thus, the phrase “consisting essentially of” indicates that the listed elements are required or mandatory, but that other elements are optional and may or may not be present depending upon whether or not they affect the activity or action of the listed elements.

[0029] The terms “complementary” and “complementarity” refer to polynucleotides (i.e., a sequence of nucleotides) related by the base-pairing rules. For example, the sequence “A-G-T,” is complementary to the sequence “T-C-A.” Complementarity may be “partial,” in which only some of the nucleic acids' bases are matched according to the base pairing rules. Or, there may be “complete” or “total” complementarity between the nucleic acids. The degree of complementarity between nucleic acid strands has significant effects on the efficiency and strength of hybridization between nucleic acid strands.

[0030] By “corresponds to” or “corresponding to” is meant (a) a polynucleotide having a nucleotide sequence that is substantially identical or complementary to all or a portion of a reference polynucleotide sequence or encoding an amino acid sequence identical to an amino acid sequence in a peptide or protein; or (b) a peptide or polypeptide having an amino acid sequence that is substantially identical to a sequence of amino acids in a reference peptide or protein.

[0031] By “derivative” is meant a polypeptide that has been derived from the basic sequence by modification, for example by conjugation or complexing with other chemical moieties (e.g., pegylation) or by post-translational modification techniques as would be understood in the art. The term “derivative” also includes within its scope alterations that have been made to a parent sequence including additions or deletions that provide for functionally equivalent molecules.

[0032] By “enzyme reactive conditions” it is meant that any necessary conditions are available in an environment (i.e., such factors as temperature, pH, and lack of inhibiting substances) which will permit the enzyme to function. Enzyme reactive conditions can be either in vitro, such as in a test tube, or in vivo, such as within a cell.

[0033] As used herein, the terms “function” and “functional” and the like refer to a biological, enzymatic, or therapeutic function.

[0034] By “gene” is meant a unit of inheritance that occupies a specific locus on a chromosome and consists of transcriptional and/or translational regulatory sequences and/or a coding region and/or non-translated sequences (i.e., introns, 5′ and 3′ untranslated sequences).

[0035] “Homology” refers to the percentage number of amino acids that are identical or constitute conservative substitutions. Homology may be determined using sequence comparison programs such as GAP (Deveraux et al., 1984, Nucleic Acids Research 12, 387-395) which is incorporated herein by reference. In this way sequences of a similar or substantially different length to those cited herein could be compared by insertion of gaps into the alignment, such gaps being determined, for example, by the comparison algorithm used by GAP.

[0036] The term “host cell” includes an individual cell or cell culture which can be or has been a recipient of any recombinant vector(s) or isolated polynucleotide of the invention. Host cells include progeny of a single host cell, and the progeny may not necessarily be completely identical (in morphology or in total DNA complement) to the original parent cell due to natural, accidental, or deliberate mutation and/or change. A host cell includes cells transfected or infected in vivo or in vitro with a recombinant vector or a polynucleotide of the invention. A host cell which comprises a recombinant vector of the invention is a recombinant host cell.

[0037] By “isolated” is meant material that is substantially or essentially free from components that normally accompany it in its native state. For example, an “isolated polynucleotide”, as used herein, refers to a polynucleotide, which has been purified from the sequences which flank it in a naturally-occurring state, e.g., a DNA fragment which has been removed from the sequences that are normally adjacent to the fragment. Alternatively, an “isolated peptide” or an “isolated polypeptide” and the like, as used herein, refer to in vitro isolation and/or purification of a peptide or polypeptide molecule from its natural cellular environment, and from association with other components of the cell.

[0038] By “increased” or “increasing” is meant the ability of one or more modified photosynthetic microorganisms, e.g., Cyanobacteria, to produce a greater amount of a given fatty acid, lipid molecule, or triglyceride as compared to a control Cyanobacteria, such as an unmodified Cyanobacteria or a differently modified Cyanobacteria. Production of fatty acids can be measured according to techniques known in the art, such as Nile Red staining and gas chromatography. Production of triglycerides can be measured, for example, using commercially available enzymatic tests, including colorimetric enzymatic tests using glycerol-3-phosphate-oxidase.

[0039] As used herein, “light harvesting protein” (LHP), means a protein that may be part of or associated with a larger supercomplex of a photosystem, the functional unit in photosynthesis. The LHP is used, for example, by plants and photosynthetic bacteria to collect more of the incoming light (e.g. photons) than would be captured by the photosynthetic reaction center alone.

[0040] As used herein “light limiting conditions” means that the rate of photosynthetic or light harvesting activity and/or carbon fixation associated with photosynthetic microorganisms is limited by the amount of light available (as opposed to nutrient limiting conditions, or CO₂ limiting conditions, for example).

[0041] As used herein, “neutral lipid” means any lipid that is soluble only in solvents of very low polarity. Neutral lipids are divided into two main groups: (1) acylglycerols (glycerides), i.e. fatty-acid esters of glycerol; and (2) waxes, i.e. fatty-acid esters of long-chain monohydroxy alcohols. More precisely called a fatty acid ester. Arises from the joining of the fatty acid carboxyl group to a hydroxyl group to make an ester bond. This can occur, for example, between a fatty acid and glycerol to make mono, di and triglycerides, or between a fatty acid and an alcohol to make a wax ester.

[0042] By “obtained from” is meant that a sample such as, for example, a polynucleotide extract or polypeptide extract is isolated from, or derived from, a particular source, such as a desired organism or a specific tissue within a desired organism. “Obtained from” can also refer to the situation in which a polynucleotide or polypeptide sequence is isolated from, or derived from, a particular organism or tissue within an organism. For example, a polynucleotide sequence encoding a diacylglycerol acyltransferase, phosphatidate phosphatase, and/or acetyl-CoA carboxylase enzyme may be isolated from a variety of prokaryotic or eukaryotic organisms, or from particular tissues or cells within certain eukaryotic organism.

[0043] The term “operably linked” as used herein means placing a gene under the regulatory control of a promoter, which then controls the transcription and optionally the translation of the gene. In the construction of heterologous promoter/structural gene combinations, it is generally preferred to position the genetic sequence or promoter at a distance from the gene transcription start site that is approximately the same as the distance between that genetic sequence or promoter and the gene it controls in its natural setting; i.e. the gene from which the genetic sequence or promoter is derived. As is known in the art, some variation in this distance can be accommodated without loss of function. Similarly, the preferred positioning of a regulatory sequence element with respect to a heterologous gene to be placed under its control is defined by the positioning of the element in its natural setting; i.e., the genes from which it is derived. “Constitutive promoters” are typically active, i.e., promote transcription, under most conditions. “Inducible promoters” are typically active only under certain conditions, such as in the presence of a given molecule factor (e.g., IPTG) or a given environmental condition (e.g., particular CO₂ concentration, nutrient levels, light, heat). In the absence of that condition, inducible promoters typically do not allow significant or measurable levels of transcriptional activity. For example, inducible promoters may be induced according to temperature, pH, a hormone, a metabolite (e.g., lactose, mannitol, an amino acid), light (e.g., wavelength specific), osmotic potential (e.g., salt induced), a heavy metal, or an antibiotic. Numerous standard inducible promoters will be known to one of skill in the art.

[0044] The recitation “polynucleotide” or “nucleic acid” as used herein designates mRNA, RNA, cRNA, rRNA, cDNA or DNA. The term typically refers to polymeric form of nucleotides of at least 10 bases in length, either ribonucleotides or deoxynucleotides or a modified form of either type of nucleotide. The term includes single and double stranded forms of DNA.

[0045] The terms “polynucleotide variant” and “variant” and the like refer to polynucleotides displaying substantial sequence identity with a reference polynucleotide sequence or polynucleotides that hybridize with a reference sequence under stringent conditions that are defined hereinafter. These terms also encompass polynucleotides that are distinguished from a reference polynucleotide by the addition, deletion or substitution of at least one nucleotide. Accordingly, the terms “polynucleotide variant” and “variant” include polynucleotides in which one or more nucleotides have been added or deleted, or replaced with different nucleotides. In this regard, it is well understood in the art that certain alterations inclusive of mutations, additions, deletions and substitutions can be made to a reference polynucleotide whereby the altered polynucleotide retains the biological function or activity of the reference polynucleotide, or has increased activity in relation to the reference polynucleotide (i.e., optimized). Polynucleotide variants include, for example, polynucleotides having at least 50% (and at least 51% to at least 99% and all integer percentages in between) sequence identity with a reference polynucleotide sequence that encodes a diacylglycerol acyltransferase, a phosphatidate phosphatase, and/or an acetyl-CoA carboxylase enzyme. The terms “polynucleotide variant” and “variant” also include naturally-occurring allelic variants and orthologs that encode these enzymes.

[0046] With regard to polynucleotides, the term “exogenous” refers to a polynucleotide sequence that does not naturally occur in a wild-type cell or organism, but is typically introduced into the cell by molecular biological techniques. Examples of exogenous polynucleotides include vectors, plasmids, and/or man-made nucleic acid constructs encoding a desired protein. With regard to polynucleotides, the term “endogenous” or “native” refers to naturally occurring polynucleotide sequences that may be found in a given wild-type cell or organism. For example, certain cyanobacterial species do not typically contain a DGAT gene, and, therefore, do not comprise an “endogenous” polynucleotide sequence that encodes a DGAT polypeptide. Also, a particular polynucleotide sequence that is isolated from a first organism and transferred to second organism by molecular biological techniques is typically considered an “exogenous” polynucleotide with respect to the second organism.

[0047] “Polypeptide,” “polypeptide fragment,” “peptide” and “protein” are used interchangeably herein to refer to a polymer of amino acid residues and to variants and synthetic analogues of the same. Thus, these terms apply to amino acid polymers in which one or more amino acid residues are synthetic non-naturally occurring amino acids, such as a chemical analogue of a corresponding naturally occurring amino acid, as well as to naturally-occurring amino acid polymers. In certain aspects, polypeptides may include enzymatic polypeptides, or “enzymes,” which typically catalyze (i.e., increase the rate of) various chemical reactions.

[0048] The recitation polypeptide “variant” refers to polypeptides that are distinguished from a reference polypeptide sequence by the addition, deletion or substitution of at least one amino acid residue. In certain embodiments, a polypeptide variant is distinguished from a reference polypeptide by one or more substitutions, which may be conservative or non-conservative. In certain embodiments, the polypeptide variant comprises conservative substitutions and, in this regard, it is well understood in the art that some amino acids may be changed to others with broadly similar properties without changing the nature of the activity of the polypeptide. Polypeptide variants also encompass polypeptides in which one or more amino acids have been added or deleted, or replaced with different amino acid residues.

[0049] The present invention contemplates the use in the methods described herein of variants of full-length enzymes having, photosynthetic or light harvesting activity, diacylglycerol acyltransferase activity, phosphatidate phosphatase activity, and/or acetyl-CoA carboxylase activity, truncated fragments of these full-length polypeptides, variants of truncated fragments, as well as their related biologically active fragments. Typically, biologically active fragments of a polypeptide may participate in an interaction, for example, an intra-molecular or an inter-molecular interaction. An inter-molecular interaction can be a specific binding interaction or an enzymatic interaction (e.g., the interaction can be transient and a covalent bond is formed or broken). Biologically active fragments of a polypeptide/enzyme having a light harvesting, activity, diacylglycerol acyltransferase activity, a phosphatidate phosphatase activity, and/or acetyl-CoA carboxylase activity include peptides comprising amino acid sequences sufficiently similar to, or derived from, the amino acid sequences of a (putative) full-length reference polypeptide sequence. Typically, biologically active fragments comprise a domain or motif with at least one activity of a nblA polypeptide, an rpaB polypeptide, a pbsB polypeptide, a pbsC polypeptide, a Phycobiliprotein polypeptide, a diacylglycerol acyltransferase polypeptide, phosphatidate phosphatase polypeptide, and/or acetyl-coA carboxylase polypeptide, and may include one or more (and in some cases all) of the various active domains. A biologically active fragment of nblA, rpaB, pbsB, pbsC, Phycobiliprotein, diacylglycerol acyltransferase, phosphatidate phosphatase, and/or acetyl-CoA carboxylase polypeptide can be a polypeptide fragment which is, for example, 10, 11, 12, 13, 14, 15, 16, 17, 18, 19, 20, 21, 22, 23, 24, 25, 26, 27, 28, 29,30, 40, 50, 60, 70, 80, 90, 100, 110, 120, 130, 140, 150, 160, 170, 180, 190, 200, 220, 240, 260, 280, 300, 320, 340, 360, 380, 400, 450, 500, 600 or more contiguous amino acids, including all integers in between, of a reference polypeptide sequence. In certain embodiments, a biologically active fragment comprises a conserved enzymatic sequence, domain, or motif, as described elsewhere herein and known in the art. Suitably, the biologically-active fragment has no less than about 1%, 10%, 25%, or 50% of an activity of the wild-type polypeptide from which it is derived.

[0050] A “reference sequence,” as used herein, refers to a wild-type polynucleotide or polypeptide sequence from any organism, e.g., wherein the polynucleotide encodes a polypeptide having a diacylglycerol acyltransferase enzymatic activity, a phosphatidate phosphatase enzymatic activity, or an acetyl-CoA carboxylase enzymatic activity, as described herein and known in the art. Exemplary polypeptide “reference sequences” are provided herein, including the amino acid sequence of a diacylglycerol acyltransferase polypeptide from Acinetobacter baylii (SEQ ID NO:1), the amino acid sequence of a phosphatidate phosphatase polypeptide (yPah1) from Saccharomyces cerevisiae (SEQ ID NO:2), and the amino acid sequence of an acyl-CoA carboxylase (yAcc1) from Saccharomyces cerevisiae (SEQ ID NO:3), among others (see, e.g., SEQ ID NOS:4-9, among others known to a person skilled in the art).

[0051] The recitations “sequence identity” or, for example, comprising a “sequence 50% identical to,” as used herein, refer to the extent that sequences are identical on a nucleotide-by-nucleotide basis or an amino acid-by-amino acid basis over a window of comparison. Thus, a “percentage of sequence identity” may be calculated by comparing two optimally aligned sequences over the window of comparison, determining the number of positions at which the identical nucleic acid base (e.g., A, T, C, G, I) or the identical amino acid residue (e.g., Ala, Pro, Ser, Thr, Gly, Val, Leu, Ile, Phe, Tyr, Trp, Lys, Arg, His, Asp, Glu, Asn, Gln, Cys and Met) occurs in both sequences to yield the number of matched positions, dividing the number of matched positions by the total number of positions in the window of comparison (i.e., the window size), and multiplying the result by 100 to yield the percentage of sequence identity.

[0052] Terms used to describe sequence relationships between two or more polynucleotides or polypeptides include “reference sequence”, “comparison window”, “sequence identity”, “percentage of sequence identity” and “substantial identity”. A “reference sequence” is at least 12 but frequently 15 to 18 and often at least 25 monomer units, inclusive of nucleotides and amino acid residues, in length. Because two polynucleotides may each comprise (1) a sequence (i.e., only a portion of the complete polynucleotide sequence) that is similar between the two polynucleotides, and (2) a sequence that is divergent between the two polynucleotides, sequence comparisons between two (or more) polynucleotides are typically performed by comparing sequences of the two polynucleotides over a “comparison window” to identify and compare local regions of sequence similarity. A “comparison window” refers to a conceptual segment of at least 6 contiguous positions, usually about 50 to about 100, more usually about 100 to about 150 in which a sequence is compared to a reference sequence of the same number of contiguous positions after the two sequences are optimally aligned. The comparison window may comprise additions or deletions (i.e., gaps) of about 20% or less as compared to the reference sequence (which does not comprise additions or deletions) for optimal alignment of the two sequences. Optimal alignment of sequences for aligning a comparison window may be conducted by computerized implementations of algorithms (GAP, BESTFIT, FASTA, and TFASTA in the Wisconsin Genetics Software Package Release 7.0, Genetics Computer Group, 575 Science Drive Madison, Wis., USA) or by inspection and the best alignment (i.e., resulting in the highest percentage homology over the comparison window) generated by any of the various methods selected. Reference also may be made to the BLAST family of programs as for example disclosed by Altschul et al., 1997, Nucl. Acids Res. 25:3389. A detailed discussion of sequence analysis can be found in Unit 19.3 of Ausubel et al., “Current Protocols in Molecular Biology”, John Wiley & Sons Inc, 1994-1998, Chapter 15.

[0053] As used herein, the term “triglyceride” (triacylglycerol or neutral fat) refers to a fatty acid triester of glycerol. Triglycerides are typically non-polar and water-insoluble. Phosphoglycerides (or glycerophospholipids) are major lipid components of biological membranes.

[0054] “Transformation” refers to the permanent, heritable alteration in a cell resulting from the uptake and incorporation of foreign DNA into the host-cell genome; also, the transfer of an exogenous gene from one organism into the genome of another organism.

[0055] By “vector” is meant a polynucleotide molecule, preferably a DNA molecule derived, for example, from a plasmid, bacteriophage, yeast or virus, into which a polynucleotide can be inserted or cloned. A vector preferably contains one or more unique restriction sites and can be capable of autonomous replication in a defined host cell including a target cell or tissue or a progenitor cell or tissue thereof, or be integrable with the genome of the defined host such that the cloned sequence is reproducible. Accordingly, the vector can be an autonomously replicating vector, i.e., a vector that exists as an extra-chromosomal entity, the replication of which is independent of chromosomal replication, e.g., a linear or closed circular plasmid, an extra-chromosomal element, a mini-chromosome, or an artificial chromosome. The vector can contain any means for assuring self-replication. Alternatively, the vector can be one which, when introduced into the host cell, is integrated into the genome and replicated together with the chromosome(s) into which it has been integrated. Such a vector may comprise specific sequences that allow recombination into a particular, desired site of the host chromosome. A vector system can comprise a single vector or plasmid, two or more vectors or plasmids, which together contain the total DNA to be introduced into the genome of the host cell, or a transposon. The choice of the vector will typically depend on the compatibility of the vector with the host cell into which the vector is to be introduced. In the present case, the vector is preferably one which is operably functional in a bacterial cell, such as a cyanobacterial cell. The vector can include a reporter gene, such as a green fluorescent protein (GFP), which can be either fused in frame to one or more of the encoded polypeptides, or expressed separately. The vector can also include a selection marker such as an antibiotic resistance gene that can be used for selection of suitable transformants.

[0056] The terms “wild-type” and “naturally occurring” are used interchangeably to refer to a gene or gene product that has the characteristics of that gene or gene product when isolated from a naturally occurring source. A wild type gene or gene product (e.g., a polypeptide) is that which is most frequently observed in a population and is thus arbitrarily designed the “normal” or “wild-type” form of the gene.

### Modified Photosynthetic Microorganisms and Method of Generation Thereof

[0057] The present disclosure, therefore, relates generally to modified photosynthetic organisms, including modified Cyanobacteria, and methods of generation thereof, which have been modified to produce or store reduced levels of light harvesting protein (LHP) as compared to wild-type photosynthetic microorganisms. In particular embodiments, the modified photosynthetic organism is genetically modified, for instance, relative to the wild-type or most frequently observed photosynthetic organism of that same species. Genetic modifications can be man-made and/or naturally-occurring, for instance, by direct molecular biological intervention (e.g., cloning or insertion of exogenous genetic elements to modulate expression of genes associated with LHP synthesis/storage), directed evolution under controlled conditions to enhance natural selection of LHP-deficient or LHP-reduced mutants, or identification of spontaneous LHP-deficient or LHP-reduced mutants under natural conditions, including combinations thereof. For instance, Cyanobacteria, such as Synechococcus, which contain modulations of the nb/A, rpaB, pbsB, pbsC, or Phycobiliprotein gene, individually or in various combinations, may produce and accumulate significantly reduced levels of LHP as compared to wild-type Cyanobacteria. These modified Cyanobacterium while producing or storing reduced levels of LHP unexpectedly show increased photosynethetic activity.

[0058] Embodiments of the present disclosure include a cell culture comprising modified Cyanobacteria that have an enhanced level of growth as compared to corresponding wild-type Cyanobacteria, wherein the modified Cyanobacteria have a deletion of a phycocyanin lyase (PL) gene. Phycocyanin lyases (PL) catalyze the covalent attachment of the phycocyanobilin chromophore to phycocyanin. PL is a heterodimer of the proteins that are coded by the genes cpcE and cpcF. PL is part of a broad class of enzymes known as bilin lyases that attach bilins to proteins that are subunits of the phycobilisome. Examples of proteins that form a phycocyanin lyase are Synpcc7942_orf1054 (cpcE) (SEQ ID NO:224) and Synpcc7942_orf1055 (cpcF) (SEQ ID NO:225) from Synechococcus elongatus (also Synpcc7002_A2213 (SEQ ID NO:226) and Synpcc7002_A2214 (SEQ ID NO:227) from Synechococcus sp. PCC 7002). Phycocyanobilin lyases can be identified in a heterologous Escherichia coli system. In this system E. coli is transformed with five different genes. The first two genes, heme oxygenase (hox1) and phycocyanobilin:ferredoxin oxidoreductase (pcyA), are necessary for the conversion of heme to phycocyanobilin. The third gene, cpcA, is the phycocyanin protein that binds the phycocyanobilin chromophore. The fourth and fifth gene in this case are the cpcE and cpcF genes that encode the two subunits of phycocyanin lyase (see Guan, et al. (2007) Appl Biochem Biotechnol. 142 52-9). The deletion of the cpcE gene reduces both the amount and activity of phycocyanin, because CpcE is required for attachment of the bilin chromophore to phycocyanin, and the phycocyanin protein is unstable when the bilin is not bound. The resulting phenotype is increased growth rate, believed to be caused by improved light “sharing”.

[0059] A knockout mutant S. elongatus (ΔcpcE) was constructed with the plasmid pTJ014 Del_cpcE (SEQ ID NO:228) shown in FIG. 2. As shown in FIG. 3, the resulting mutant had a lower absorbance at 620 nm, a wavelength at which phycocyanin characteristically absorbs, than an S. elongatus strain which was not genetically modified (WT). As can be seen in FIG. 4, phycocyanin content is decreased dramatically in the ΔcpcE strain. Allophycocyanin also decreased in the ΔcpcE strain while chlorophyll and carotenoid content increased in the ΔcpcE strain. Pigment levels of the WT and ΔcpcE strain were measured following growth at 500 μmol photon m⁻² s⁻¹ and 5% CO₂. Phycocyanin protein was quantified by the method of Bennet and Bogorad (Bennet and Bogorad. (1973) J. Cell Biol. 58:419-35). Blue-green algae contain chl a only (Bogorad, 1962).

[0060] The knockout mutant S. elongatus (ΔcpcE) was grown in 250 mL Erlenmeyer flasks with 5% CO₂ at 30° C. with shaking at 200 rpm in 3× BG-11 media with 20 mM Na₂HPO₄ (pH 7) for 72 hr at two different light levels. FIGS. 5A and 5B show growth and biomass respectively for cultures grown at 500 μmol photon m⁻² s⁻¹. FIGS. 6A and 6B show growth and biomass respectively for cultures grown at 1000 μmol photon m⁻² s⁻¹. At both light levels the ΔcpcE strain grew faster than WT (FIG. 5A and FIG. 6A) and also produced more biomass after 72 hours of growth (FIG. 5B and FIG. 6B.) Growth and biomass both increased at the higher light level.

[0061] FIG. 7 shows the effects varying light levels on growth. Growth was measured for WT and ΔcpcE strains as oxygen evolution μM O₂/μg dry weight/hr. The measured oxygen evolution rates were normalized to dry weight. After 24 hr of culturing in 250 mL Erlenmeyer flasks at 500 μmol photon m⁻² s⁻¹ and 5% CO₂ cultures were pelleted by centrifugation at 10,000×g for 1 min then resuspended with a micropipettor in 2 mL of 3× BG-11 media and 20 mM Na₂HPO₄ (pH 7) to a final cell density of 2 OD₇₅₀×mL. The resuspended cultures of WT and ΔcpcE were illuminated at 50, 100, 400, 1000, and 1800 μmol photon m⁻² s⁻¹. The resulting growth curves in FIG. 7 show that the ΔcpcE strain grew more that the WT strain at all light levels and that increase in light intensity above 1000 μmol photon m⁻² s⁻¹ does not provide additional growth.

[0062] Chl a was quantitatively removed from washed cell pellets by extraction with two 5.0-ml aliquots of absolute methanol in dim light at about 23° C. The chl a content of the combined extracts was determined from the optical density of the solution at 665 nm. The extinction coefficient of chl a at 665 nm in absolute methanol is 74.5 ml/mg-cm (MacKinney, 1941). Absorption spectra of methanol extracts indicated that pheophytinization did not occur to any significant extent during chl a extraction. To estimate phycobiliprotein contents, washed cell pellets were resuspended to a total volume of 6.0 ml with 0.01 M sodium phosphate, pH 7.0, 0.15 M NaCl (buffered saline). The cell suspensions were transferred to Beckman no. 302235 tubes (Beckman Instruments, Inc., Spinco Div., Palo Alto, Calif.), quick frozen in liquid nitrogen, capped with Parafilm, and stored at −20° C. in darkness before disruption. Thawed cell suspensions were immersed in a stirred ice bath and sonicated with the microtip of a Heat Systems model W185D sonifier (Heat Systems-Ultrasonics, Inc., Plainview, N.Y.) operated at power setting 6. Each aliquot of cells was exposed to 4 min of sonication, with alternate 1-min periods of sonication and cooling. Light microscope examinations demonstrated that this procedure quantitatively disrupts the cells. Over the cell concentration ranges used in these experiments, the amount of each water-soluble phycobiliprotein released into the buffered saline solution was directly proportional to the number of cells disrupted. Sonicates were transferred to Beckman polycarbonate tubes and centrifuged at 4° C. and 81,000 g at average radius of centrifugation (Rₐᵥ) for 45 min. This procedure pellets the membrane fragments of the cells, which contain chl a and most of the carotenoids. Phycobiliproteins could not be detected in membrane fragments which were resuspended in buffered saline. The supernatant (crude extract) contains the phycobiliproteins and other soluble proteins. Phycobiliproteins are responsible for essentially all of the visible light absorption above 500 nm in the crude extracts. The upper 5.5 ml of the supernatants were carefully withdrawn and their absorption spectrawere determined from 730 to 500 nm. Insertion of the optical densities of the crude extracts at 562, 615, and 652 mn into equations derived from extinction coefficients of the purified phycobiliproteins permitted the PE, C-phycocyanin (PC), and allophycocyanin (APC) concentrations in the crude extracts to be ascertained. The extinction coefficient of each of the three F. diplosiphon phycobiliproteins, purified by the procedure of Bennett and Bogorad (1971), was determined in buffered saline at 562, 615, and 652 nm. These wavelengths correspond to the absorption maxima of PE, PC, and APC, respectively, in buffered saline. This solvent was selected because it provides optimal conditions for precipitin reactions with rabbit antisera (Kabat and Mayer, 1967). The method of Lowry et al. (1951) was used to estimate phycobiliprotein concentrations for extinction coefficient calculations and also to estimate total soluble protein concentrations in crude algal extracts. Standard curves for the Lowry protein measurements were obtained from solutions prepared with cytochrome c which had been thoroughly desiccated over P205 in vacuo. Equations for calculating phycobiliprotein concentrations in crude extracts were derived by combining the extinction coefficients with three simultaneous equations having the form ODa=(ePE, XCPEI)+(EPC, λ CPci)+(EApe, XCAPCI), in which λ equaled 562, 615, and 652 nm.

[0063] The kanamycin resistant strain was grown in a high light chamber (500 μmol photons m⁻² s⁻¹) with 5% CO₂ for 48 hr. Growth was compared to a genetically unaltered S. elongatus strain (WT). FIG. 5 shows that growth, as determined by optical density at 750 nm, was improved in the ΔcpcE strain by 13% over the measured time interval.

[0064] Embodiments of the present disclosure include a cell culture comprising modified Cyanobacteria that have an enhanced level of photosynthetic activity as compared to corresponding wild-type Cyanobacteria, wherein the modified Cyanobacteria have a reduced amount of a LHP polypeptide as compared to a corresponding wild-type Cyanobacteria. In particular embodiments, the modified cyanobacteria grow and/or divide at an increased rate under a condition, such as a light-limited condition, as compared to the corresponding wild-type cyanobacteria. In particular embodiments, wherein the modified Cyanobacteria have reduced expression of one or more genes of light harvesting proteins biosynthesis and/or transportation pathway as compared to the corresponding wild-type Cyanobacteria. In some embodiments, the modified Cyanobacterium has a reduced level of expression of one or more genes of a LHP biosynthesis or storage pathway and/or overexpresses one or more genes or proteins of a LHP breakdown pathway, such that the modified Cyanobacterium synthesizes or accumulates a reduced amount of LHP, as compared to a wild-type Cyanobacterium. In one embodiment, the modified Cyanobacterium comprises one or more mutations or deletions in one or more genes of a LHP biosynthesis or storage pathway, which may be, e.g., complete or partial gene deletions. In other embodiments, the modified Cyanobacteria comprise one or more polynucleotides comprising an antisense RNA sequence that targets, e.g., hybridizes to, one or more genes or mRNAs of a LHP biosynthesis or storage pathway, such as an antisense oligonucleotide or a short interfering RNA (siRNA), or a vector that expresses one or more such polynucleotides.

[0065] In certain embodiments, individual Cyanobacteria of the modified Cyanobacteria have a reduced amount of phycobilsomes as compared to the corresponding wild-type Cyanobacteria. In specific embodiments, the modified Cyanobacteria have an increased proteolytic degradation of phycobilisomes as compared to the corresponding wild-type Cyanobacteria. In specific embodiments, the modified Cyanobacteria have an enhanced expression of an nblA gene as compared to the corresponding wild-type Cyanobacteria. In specific embodiments, the enhanced expression of the nblA gene comprises the enhanced expression of an endogenous nblA gene as compared to the corresponding wild-type Cyanobacteria. In some instances, the expression of the nblA gene is enhanced by replacing a promoter of the nblA gene.

[0066] In certain embodiments, the modified Cyanobacteria have a reduced level of harvesting proteins as compared to the corresponding wild-type Cyanobacteria. In specific embodiments, the modified Cyanobacteria have reduced expression of an RpaB gene and/or reduced RpaB activity as compared to the corresponding wild-type Cyanobacteria. In specific embodiments, the modified Cyanobacteria have over-expressed N terminal fragments of the RpaB gene. In specific embodiments, the level of RpaB activity is reduced by replacing a promoter of the RpaB gene. For example, N terminal fragments of the RpaB gene may be over-expressed by replacing a promoter of the RpaB gene.

[0067] In certain embodiments, the modified Cyanobacteria have a reduced level of photosystem II light harvesting proteins as compared to the corresponding wild-type Cyanobacteria. In specific embodiments, the modified Cyanobacteria have a reduced expression of a PbsB gene or a PbsC gene as compared to the corresponding wild-type Cyanobacteria. In specific embodiments, the reduced expression of the PbsB gene or the PbsC gene comprises the reduced expression of an endogenous PbsB gene or an endogenous PbsC gene as compared to the corresponding wild-type Cyanobacteria. In some embodiments, the expression of the PbsB gene or the PbsC gene gene is reduced by replacing a promoter of one of the PbsB gene and the PbsC gene.

[0068] In certain embodiments, the modified Cyanobacteria have a reduced amount of phycobiliproteins as compared to the corresponding wild-type Cyanobacteria. In specific embodiments, the modified Cyanobacterium have a reduced expression of phycocyanin genes or allophycocyanin genes as compared to the corresponding wild-type Cyanobacterium. In specific embodiments, the reduced expression of the phycocyanin genes or allophycocyanin comprises the reduced expression of endogenous phycocyanin genes or allophycocyanin genes as compared to the corresponding wild-type Cyanobacteria. In some instances, the expression of the phycocyanin genes or allophycocyanin genes is reduced by replacing one or more promoters of the phycocyanin genes and allophycocyanin genes.

[0069] Embodiments of the present disclosure also include method for generating modified cyanobacteria. In some embodiments, the method comprises modifying one or more polynucleotides associated with a light harvesting proteins (LHP) of Cyanobacteria to generate the modified Cyanobacteria, wherein the modified cyanobacteria have an enhanced level of photosynthetic activity as compared to corresponding wild-type Cyanobacteria. In these and other embodiments, the method comprises culturing Cyanobacteria under a stress condition; and isolating modified Cyanobacteria that have an enhanced level of photosynthetic activity as compared to corresponding wild-type Cyanobacteria, wherein the stress condition comprises culturing under increased light, culturing in metronidazole containing growth media or both.

[0070] In certain embodiments, the culture is maintained at an optical cell density ranging from 0.25-2.0, 0.5-1.5, or about 1.0, i.e., within 10% of 1.0. In certain embodiments, the cultured modified Cyanobacteria show an increased growth rate, increased oxygen evolution or both when compared with a corresponding wild-type Cyanobacteria. For example, a growth rate of the cultured modified Cyanobacteria may be at least 10% or at least 20% greater than a growth rate of a corresponding microorganism grown in light limiting conditions. In other embodiments, a growth rate of the microorganism is at least about 1.5, 2, 3, 4, 5, 6, 7, 8, 9, 10 or 20-fold greater than a growth rate of a corresponding Cyanobacteria.

[0071] In certain aspects, the modified photosynthetic organisms described herein are further modified to increase production of lipids, for instance, by introducing and/or overexpressing one or more polypeptides associated with lipid biosynthesis. Examples of such lipids include fatty acids, fatty alcohols, fatty aldehydes, alkane/alkenes, triglycerides, and wax esters. Hence, in some instances, modified photosynthetic microorganisms that accumulate a reduced amount of LHP as compared to the wild-type photosynthetic microorganism can further comprise one or more introduced or overexpressed polynucleotides encoding one or more of an acyl carrier protein (ACP), acyl ACP synthase (Aas), acyl-ACP reductase, alcohol dehydrogenase, aldehyde dehydrogenase, aldehyde decarbonylase, thioesterase (TES), acetyl coenzyme A carboxylase (ACCase), diacylglycerol acyltransferase (DGAT), phosphatidic acid phosphatase (PAP; or phosphatidate phosphatase), triacylglycerol (TAG) hydrolase, fatty acyl-CoA synthetase, lipase/phospholipase, or any combination thereof.

[0072] Certain embodiments thus include modified photosynthetic microorganisms that accumulate a reduced amount of LHP as compared to the wild-type photosynthetic microorganism, and which comprise one or more introduced polynucleotides that encode an enzyme having DGAT activity. Optionally, to further increase production of triglycerides, such photosyntheticm microorganisms can further comprise one or more introduced or overexpressed polynucleotides that encode a phosphatidate phosphatase, ACCase, ACP, phospholipase B, phospholipase C, fatty acyl Co-A synthetase, or any combination thereof. Certain embodiments include an introduced DGAT in combination with an introduced or overexpressed ACCase, PAP, or both.

[0073] Certain embodiments of the present disclosure relate to modified photosynthetic organisms, including Cyanobacteria, and methods of use thereof, wherein the modified photosynthetic microorganisms further comprise one or more over-expressed, exogenous, or introduced polynucleotides encoding an acyl-ACP reductase polypeptide, or a fragment or variant thereof. In particular embodiments, the fragment or variant thereof retains at least 50% of one or more activity of the wild-type acyl-ACP reductase polypeptide. As with most any of the overexpressed polypeptides described herein, an overexpressed acyl-ACP reductase can be encoded by an endogenous or naturally-occurring polynucleotide which is operably linked to an introduced promoter, typically upstream of the microorganism's natural acyl-ACP reductase coding region, and/or it can be encoded by an introduced polynucleotide that encodes an acyl-ACP reductase.

[0074] In certain embodiments, an introduced promoter is inducible, and in some embodiments it is constitutive. Included are weak promoters under non-induced conditions. Exemplary promoters are described elsewhere herein and known in the art. In particular embodiments, the introduced promoter is exogenous or foreign to the photosynthetic microorganism, i.e., it is derived from a genus/species that differs from the microorganism being modified. In other embodiments, the introduced promoter is a recombinantly introduced copy of an otherwise endogenous or naturally-occurring promoter sequence, i.e., it is derived from the same species of microorganism being modified.

[0075] Similar principles can apply to the introduced polynucleotide which encodes the acyl-ACP reductase or other overexpressed polypeptide (e.g., aldehyde dehydrogenase). For instance, in particular embodiments, the introduced polynucleotide encoding the acyl-ACP reductase or other polypeptide is exogenous or foreign to the photosynthetic microorganism, i.e., it is derived from a genus/species that differs from the microorganism being modified. In other embodiments, the introduced polynucleotide is a recombinantly introduced copy of an otherwise endogenous or naturally-occurring sequence, i.e., it is derived from the same species of microorganism being modified.

[0076] Acyl-ACP reductase polypeptides, and fragments and variants thereof, that may be used according to the compositions and methods of the present disclosure are described herein. The present disclosure contemplates the use of naturally-occurring and non-naturally-occurring variants of these acyl-ACP reductase and other lipid biosynthesis proteins (e.g., ACP, ACCase, DGAT, acyl-CoA synthetase, aldehyde dehydrogenase), as well as variants of their encoding polynucleotides. These enzyme encoding sequences may be derived from any microorganism (e.g., plants, bacteria) having a suitable sequence, and may also include any man-made variants thereof, such as any optimized coding sequences (i.e., codon-optimized polynucleotides) or optimized polypeptide sequences.

[0077] Acyl-ACP reductase polypeptides may also be overexpressed in strains of photosynthetic microorganisms that have been modified to overexpress one or more selected lipid biosynthesis proteins (e.g., selected fatty acid biosynthesis proteins, triacylglycerol biosynthesis proteins, alkane/alkene biosynthesis proteins, wax ester biosynthesis proteins).

[0078] For example, to produce triglycerides, a modified photosynthetic microorganism may comprise an overexpressed acyl-ACP reductase in combination with an introduced polynucleotide that encodes a DGAT. In these and related embodiments, triglyceride production can be further increased by introduction or overexpression of an aldehyde dehydrogenase, for instance, to increase production of fatty acids, the precursors to triglycerides. One exemplary aldehyde dehydrogenase is encoded by orf0489 of Synechococcus elongatus PCC7942. Also included are homologs or paralogs thereof, functional equivalents thereof, and fragments or variants thereofs. Functional equivalents can include aldehyde dehydrogenases with the ability to convert acyl aldehydes (e.g., nonyl-aldehyde) into fatty acids. In certain embodiments, the aldehyde dehydrogenase has the amino acid sequence of SEQ ID NO:103 (encoded by the polynucleotide sequence of SEQ ID NO:102), or an active fragment or variant of this sequence. These and related embodiments can be further combined with reduced expression and/or activity of an endogenous aldehyde decarbonylase (e.g., orf1593 in S. elongatus), described herein, to shunt carbon away from alkanes and towards fatty acids, the precursors to triglycerides.

[0079] To produce wax esters, a modified photosynthetic microorganism may comprise an overexpressed acyl-ACP reductase and an introduced polynucleotide that encodes a DGAT (e.g., a bi-functional DGAT having wax ester synthase activity) in further combination with an introduced or overexpressed polynucleotide that encodes an alcohol dehydrogenase, such as a long-chain alcohol dehydrogenase. Exemplary alcohol dehydrogenases include slr1192 from Synechocystis sp. PCC6803 and ACIAD3612 from Acinetobacter baylii (see SEQ ID NOS:104-107). Also included are homologs or paralogs thereof, functional equivalents thereof, and fragments or variants thereofs. Functional equivalents can include alcohol dehydrogenases with the ability to convert acyl aldehydes (e.g., nonyl-aldehyde, C₁₂, C₁₄, C₁₆, C₁₈, C₂₀ fatty aldehydes) into fatty alcohols, which can then be converted into wax esters by the wax ester synthase. In certain embodiments, the alcohol dehydrogenase has the amino acid sequence of SEQ ID NO:105 (slr1192; encoded by the polynucleotide sequence of SEQ ID NO:104), or an active fragment or variant of this sequence. In some embodiments, the alcohol dehydrogenase has the amino acid sequence of SEQ ID NO:107 (ACIAD3612; encoded by the polynucleotide sequence of SEQ ID NO:106), or an active fragment or variant of this sequence. Certain of these and related embodiment can be combined with any one or more of reduced expression and/or activity of an endogenous aldehyde dehydrogenase (e.g., orf0489 deletion) to shunt carbon away from fatty acid production, reduced expression and/or activity of an endogenous aldehyde decarbonylase (e.g., orf1593 deletion) to shunt carbon away from alkane production, or both. Also included are combinations that further comprise an introduced or overexpressed acyl carrier protein (ACP), optionally in combination with an introduced or overexpressed acyl-ACP synthetase (Aas).

[0080] To produce fatty alcohols, a modified photosynthetic microorganism may comprise an overexpressed acyl-ACP reductase in combination with an introduced or overexpressed alcohol dehydrogenase. These and related embodiments can be further combined with reduced expression and/or activity of an endogenous aldehyde decarbonylase (e.g., orf1593 from S. elongatus), reduced expression and/or activity of an endogenous aldehyde dehydrogenase (e.g., orf0489 from S. elongatus), or both, to respectively shunt carbon away from alkanes/alkenes and fatty acids and towards fatty alcohols.

[0081] To produce alkanes and/or alkenes, a modified photosynthetic microorganism may comprise an overexpressed acyl-ACP reductase in combination with an introduced or overexpressed aldehyde decarbonylase. Exemplary aldehyde decarbonylases include that encoded by orf1593 of S. elongatus PCC7942 and its orthologs/paralogs, including those found in Synechocystis sp. PCC6803 (encoded by orfsll0208), N. punctiforme PCC 73102, Thermosynechococcus elongatus BP-1, Synechococcus sp. Ja-3-3AB, P. marinus MIT9313, P. marinus NATL2A, and Synechococcus sp. RS 9117, the latter having at least two paralogs (RS 9117-1 and -2). These and related embodiments can be further combined with reduced expression and/or activity of an endogenous aldehyde dehydrogenase (e.g., orf0489 from S. elongatus), reduced expression and/or activity of an endogenous alcohol dehydrogenase (e.g., a long-chain alcohol dehydrogenase), or both, to respectively shunt carbon away from fatty acids and fatty alcohols and towards alkanes and/or alkenes.

[0082] To produce fatty acids, such as free fatty acids, a modified photosynthetic microorganism may comprise an overexpressed acyl-ACP reductase in optional combination with an introduced or overexpressed aldehyde dehydrogenase (e.g., orf 0489 from S. elongatus or orthologs/paralogs/homologs thereof). These and related embodiments can be further combined with reduced expression and/or activity of an aldehyde decarbonylase (e.g., orf1593 from S. elongatus), reduced expression and/or activity of an endogenous alcohol dehydrogenase (e.g., long-chain alcohol dehydrogenase), or both, to respectively shunt carbon away from alkanes and fatty alcohols and towards fatty acids. In certain embodiments, such as Cyanobacteria including S. elongatus PCC7942, orf1593 resides directly upstream of orf1594 (acyl-ACP reductase coding region) and encodes an aldehyde decarbonylase. According to one non-limiting theory, because the aldehyde decarbonylase encoded by orf1593 utilizes acyl aldehyde as a substrate for alkane production, reducing expression of this protein may further increase yields of free fatty acids by shunting acyl aldehydes (e.g., produced by acyl-ACP reductase) away from an alkane-producing pathway, and towards a fatty acid- or fatty alcohol-producing and storage pathway. PCC7942_orf1593 orthologs can be found, for example, in Synechocystis sp. PCC6803 (encoded by orfsll0208), N. punctiforme PCC 73102, Thermosynechococcus elongatus BP-1, Synechococcus sp. Ja-3-3AB, P. marinus MIT9313, P. marinus NATL2A, and Synechococcus sp. RS 9117, the latter having at least two paralogs (RS 9117-1 and -2). Included are strains having mutations or full or partial deletions of one or more genes encoding these and other aldehyde decarbonylases, such as S. elongatus PCC7942 having a full or partial deletion of orf1593, and Synechocystis sp. PCC6803 having a full or partial deletion of orfsll0208). For instance, an exemplary modified photosynthetic microorganism could comprise an overexpressed acyl-ACP reductase, combined with a full or partial deletion of the glgC gene, the glgA gene, and/or the pgm gene, optionally combined with an overexpressed aldehyde dehydrogenase, and optionally combined with a full or partial deletion of a gene encoding an aldehyde decarbonylase (e.g., PCC7942_orf1593, PCC6803_orfsll0208).

[0083] Other combinations include, for example, a modified photosynthetic microorganism comprising reduced LHP accumulation, in combination with one more of an overexpressed ACP; an overexpressed acyl-ACP reductase in combination with an overexpressed ACP; an acyl-ACP reductase in combination with an ACCase; an acyl-ACP reductase in combination with an ACP and an ACCase; an overexpressed acyl-ACP reductase in combination with an overexpressed DGAT and optionally an overexpressed acyl-CoA synthetase (e.g., a DGAT/acyl-CoA synthetase combination); an overexpressed acyl-ACP reductase with an overexpressed ACP and an overexpressed DGAT, optionally combined with an overexpressed acyl-CoA synthetase; an overexpressed acyl-ACP reductase with an overexpressed ACCase and an overexpressed DGAT, optionally in combination with an overexpressed acyl-CoA synthetase; and an overexpressed acyl-ACP reductase with an overexpressed ACP, ACCase, and an overexpressed DGAT, optionally in combination with an overexpressed acyl-CoA synthetase. Acyl-ACP reductase and DGAT-overexpressing strains, optionally in combination with an overexpressed acyl-CoA synthetase, typically produce increased triglycerides relative to DGAT-only overexpressing strains.

[0084] Any one of these embodiments can also be combined with a strain having reduced expression of an acyl-ACP synthetase (Aas). Without wishing to be bound by any one theory, an endogenous aldehyde dehydrogenase is acting on the acyl-aldehydes generated by orf1594 and converting them to free fatty acids. The normal role of such a dehydrogenase might involve removing or otherwise dealing with damaged lipids. In this scenario, it is then likely that the Aas gene product recycles these free fatty acids by ligating them to ACP. Accordingly, reducing or eliminating expression of the Aas gene product might ultimately increase production of fatty acids and thus optionally triglycerides (e.g., in a DGAT-expressing microorganism), by reducing or preventing their transfer to ACP. Included are mutations and full or partial deletions of one or more Aas genes, such as the Aas gene of Synechococcus elongatus PCC 7942. As one example, a specific modified photosynthetic microorganism could comprise an overexpressed acyl-ACP reductase, combined with a full or partial deletion of the glgC gene, the glgA gene, and/or the pgm gene, optionally combined with an overexpressed ACP, ACCase, DGAT/acyl-CoA synthetase, or all of the foregoing, optionally combined with a full or partial deletion of a gene encoding an aldehyde decarbonylase (e.g., PCC7942_orf1593, PCC6803_orfsll0208), and optionally combined with a full or partial deletion of an Aas gene encoding an acyl-ACP synthetase.

[0085] Certain embodiments of the systems and methods of the present disclosure utilize modified photosynthetic organisms with reduced LHP accumulation that are further modified to allow production of isobutanol or isopentanol. In particular embodiments, these organisms comprise one or more introduced or overexpressed polynucleotides that encode a polypeptide associated with isobutanol or isopentanol production. Examples of such polynucleotides include the genes required to convert a 2-keto acid to an aldehyde (2-keto acid decarboxylase) and then convert the aldehyde to an alcohol (alcohol dehydrogenase) in Synechococcus elongatus, according to Atsumi and Liao 2007 Nature and 2009 Nature Biotech. Expression of these genes, or functional fragments or variants thereof, should allow for the production of isobutanol or isopentanol (3-methyl-1-butanol). In certain embodiments, these genes are Alpha-ketoisovalerate decarboxylase (2-keto acid decarboxylase) from Lactococcus lactis (kivd) and Alcohol dehydrogenase from E. coli (YqhD). The polynucleotide sequence of Alpha-ketoisovalerate decarboxylase (2-keto acid decarboxylase) from Lactococcus lactis is set forth in SEQ ID NO:180, and its encoded polypeptide sequence is set forth in SEQ ID NO:181. The polynucleotide sequence of alcohol dehydrogenase from E. coli (YqhD) is set forth in SEQ ID NO:182, and its encoded polypeptide sequence is set forth in SEQ ID NO:183.

[0086] In additional related embodiments, the modified photosynthetic organism with reduced LHP accumulation are further modified to include one or more introduced or overexpressed polynucleotides involved in converting pyruvate to the precursors for isobutanol or isopentanol production. Thus, they may also be used in combination with any of the related modifications described above. Examples of such polynucleotides and encoded polypeptides include, acetolactate synthase (e.g., Synechococcus elongatus PCC7942 ilvN (NCBI YP_401451; SEQ ID NO:184)), acetolactate synthase (e.g., Synechococcus elongatus PCC7942 ilvB (NCBI YP_399158; SEQ ID NO:185)), ketol-acid reductoisomerase (e.g., Synechococcus elongatus PCC7942 ilvC (NCBI YP_400569; SEQ ID NO:186), dihydroxy-acid dehydratase (e.g., Synechococcus elongatus PCC7942 ilvD (NCBI YP_399645; SEQ ID NO:187)), 2-isopropylmalate synthase (e.g., Synechococcus elongatus PCC7942 leuA1 (NCBI YP_399447; SEQ ID NO: 188)); 2-isopropylmalate synthase (e.g., Synechococcus elongatus PCC7942 leuA2 (NCBI YP_400427; SEQ ID NO: 189)), isopropylmalate dehydratase (e.g., Synechococcus elongatus PCC7942 leuD (NCBIYP_401565; SEQ ID NO:190)), isopropylmalate dehydratase (e.g., Synechococcus elongatus PCC7942 leuC (NCBI YP_400915; SEQ ID NO:191)), 3-isopropylmalate dehydrogenase (e.g., Synechococcus elongatus PCC7942 leuB (NCBI YP_400522; SEQ ID NO:192); acetolactate synthase (e.g., Bacillus subtilus 168 alsS (NCBI NP_391482; SEQ ID NO:193)); ketol-acid reductoisomerase, NAD(P)-binding (e.g., E. coli K-12, MG1655 ilvC (NCBI NP_418222; SEQ ID NO:194)); and dihydroxyacid dehydratase (e.g., E. coli K-12, MG1655 ilvD (NCBI_YP_026248; SEQ DI NO:195)) and functional fragments and variants thereof.

[0087] In additional embodiments, the modified photosynthetic organism with reduced LHP accumulation are further modified to include one or more introduced or overexpressed polynucleotides involved in glucose secretion, in order to allow for continued secretion of glucose from LHP deficient strains that are placed under stress conditions. Examples of such polynucleotides and encoded polypeptides are glucose permeases and glucose/H+ symporters, such as glcP (e.g., Bacillus subtilis168 glcP; NCBI NP_388933; SEQ ID NO:176), glcP1 (e.g., Streptomyces coelicolor glcP1; NCBI NP_629713.1; SEQ ID NO:177), glcP2 (e.g., Streptomyces coelicolor A3 glcP2; NCBI NP_631212; SEQ ID NO:178), and Mycobacterium smegmatis MC2 155 (NCBI YP_888461; SEQ ID NO:179), and functional fragments and variants thereof.

[0088] Certain embodiments of the systems and methods of the present disclosure utilize modified photosynthetic organisms with reduced LHP accumulation that are further modified to allow production of 4-hydroxybutyrate. In particular embodiments, these photosynthetic organisms comprise one or more introduced or overexpressed polynucleotides that encode a polypeptide associated with 4-hydroxybutyrate production. Examples of such polynucleotides include the genes required to convert 2-oxogluturate into succinate semialdehyde, and then convert the latter into 4-hydroxybutyrate. In particular embodiments, an alpha-ketoglutarate decarboxylase converts 2-oxogluturate into succinate semialdehyde and a 4-hydroxybutyrate dehydrogenase converts succinate semialdehyde into 4-hydroxybutyrate. Additional examples of such polynucleotides include the genes required to convert succinate into succinyl-CoA, convert succinyl-CoA into succinate semialdehyde, and then conver the latter into 4-hydroxybutyrate. In particular embodiments, a succinyl-CoA synthetase converts succinate into succinyl-CoA, a succinate-semialdehyde dehydrogenase converts succinyl-CoA into succinate semialdehyde, and a 4-hydroxybutyrate dehydrogenase converts succinate semialdehyde into 4-hydroxybutyrate. Specific examples of alpha-ketoglutarate decarboxylases include those encoded by CCDC5180_0513 (SEQ ID NO:211) from Mycobacterium bovis and SYNPCC7002_A2770 (SEQ ID NO:212) from Synechococcus sp PCC 7002. Specific examples of 4-hydroxybutyrate dehydrogenases include those encoded by PGN_0724 (SEQ ID NO:213) from Porphyromonas gingivalis and CKR_2662 (SEQ ID NO:214) from Clostridium kluyveri. Specific examples of succinyl-CoA synthetases include the succinyl-CoA synthetase-alpha subunit encoded by sucC (b0728) (SEQ ID NO:218) from E. coli and the succinyl-CoA synthetase-beta subunit encoded by sucD (b0729) (SEQ ID NO:219) from E. coli. Specific examples of succinate-semialdehyde dehydrogenases include that encoded by PGTDC60_1813 (SEQ ID NO:220) from Porphyromonas gingivalis. Expression of certain combinations of these or related genes, or functional fragments or variants thereof, should allow for the production of 4-hydroxybutyrate from 2-oxogluturate or succinate.

[0089] Certain embodiments of the systems and methods of the present disclosure utilize modified photosynthetic organisms with reduced LHP accumulation that are further modified to allow production of 4-hydroxybutyrate and optionally 1,4-butanediol. In some embodiments, and further to the polypeptides associated with the production of 4-hydroxybutyrate (supra), these microorganisms comprise one or more introduced or overexpressed polynucleotides that encode a polypeptide associated with the production of 1,4-butanediol from 4-hydroxybutyrate. Examples of such polynucleotides include the genes required to convert 4-hydroxybutyrate into 4-hydroxybutyryl-CoA, then convert 4-hydroxybutyryl-CoA into 4-hydroxybutyraldehyde, and then convert 4-hydroxybutyraldehyde into 1,4-butanediol. In particular embodiments, a 4-hydroxybutyryl-CoA transferase converts 4-hydroxybutyrate into 4-hydroxybutyryl-CoA, an aldehyde/alcohol dehydrogenase converts 4-hydroxybutyryl-CoA into 4-hydroxybutyraldehyde (e.g., one that is capable of reducing coA-linked substrates to aldehydes/alcohols), and an aldehyde/alcohol dehydrogenase converts 4-hydroxybutyraldehyde into 1,4-butanediol. Specific examples of 4-hydroxybutyryl-CoA transferases include that encoded by cat2 (CKR_2666) (SEQ ID NO:215) from Clostridium kluyveri, including homologs from Clostridium aminobutyricum and Porphyromonas gingivalis. Specific examples of aldehyde/alcohol dehydrogenases include those encoded by adhE2 (CEA_P0034) (SEQ ID NO:216) from Clostridium acetobutylicum and adhE (b1241) (SEQ ID NO:217) from E. coli. Expression of certain combinations of these or related genes, or functional fragments or variants thereof, should allow for the production of 4-hydroxybutyrate from 2-oxogluturate or succinate, and the production of 1,4-butanediol from 4-hydroxybutyrate.

[0090] Particular embodiments of the systems and methods of the present disclosure utilize modified photosynthetic organisms with reduced LHP accumulation that are further modified to allow production of polyamine intermediates/precursors. Exemplary polyamine intermediates include agmatine and putrescine. The systems and methods described herein can produce increased agmatine and putrescine without any further modifications. However, in particular embodiments, to further increase production these microorganisms may comprise one or more introduced or overexpressed polynucleotides that encode a polypeptide associated with polyamine intermediate production. Examples of such polynucleotides include the genes required to convert L-arginine into agmatine, and optionally the genes required to convert agmatine into N-carbamoylputrescine, and then convert N-carbamoylputrescine into putrescine. In some embodiments, an arginine decarboxylase is introduced or overexpressed to convert L-arginine into agmatine. In particular embodiments, an agmatine deiminase is introduced or overexpressed to convert agmatine into N-carbamoylputrescine, and/or a N-carbamoylputrescine amidase is introduced or overexpressed to convert N-carbamoylputrescine into putrescine. Specific examples of arginine decarboxylases include that encoded by Synpcc7942_1037 (SEQ ID NO:221) from S. elongatus PCC7942. Specific examples of agmatine deiminases include that encoded by Synpcc7942_2402 (SEQ ID NO:222) and Synpcc7942_2461 from S. elongatus PCC7942. Specific examples of N-carbamoylputrescine amidases include that encoded by Synpcc7942_2145 (SEQ ID NO:223) from S. elongatus PCC7942. Introduction or overexpression of certain combinations of these or related genes, or functional fragments or variants thereof, should allow for the increased production of agmatine, putrescine, or both.

[0091] Increased expression can be achieved a variety of ways, for example, by introducing a polynucleotide into the photosynthetic organism, modifying an endogenous gene to overexpress the polypeptide, or both. For instance, one or more copies of an otherwise endogenous polynucleotide sequence can be introduced by recombinant techniques to increase expression, and/or a promoter/enhancer sequence can be introduced upstream of an endogenous gene to regulate expression.

[0092] Modified photosynthetic organisms of the present disclosure may be produced, for example, using any type of photosynthetic microorganism. These include, but are not limited to photosynthetic bacteria, green algae, and Cyanobacteria. The photosynthetic microorganism can be, for example, a naturally photosynthetic microorganism, such as a Cyanobacterium, or an engineered photosynthetic microorganism, such as an artificially photosynthetic bacterium. Exemplary microorganisms that are either naturally photosynthetic or can be engineered to be photosynthetic include, but are not limited to, bacteria; fungi; archaea; protists; eukaryotes, such as a green algae; and animals such as plankton, planarian, and amoeba. Examples of naturally occurring photosynthetic microorganisms include, but are not limited to, Spirulina maximum, Spirulina platensis, Dunaliella salina, Botrycoccus braunii, Chlorella vulgaris, Chlorella pyrenoidosa, Serenastrum capricomutum, Scenedesmus auadricauda, Porphyridium cruentum, Scenedesmus acutus, Dunaliella sp., Scenedesmus obliquus, Anabaenopsis, Aulosira, Cylindrospermum, Synechococcus sp., Synechocystis sp., and/or Tolypothrix.

[0093] A modified Cyanobacteria of the present disclosure may be from any genera or species of Cyanobacteria that is genetically manipulable, i.e., permissible to the introduction and expression of exogenous genetic material. Examples of Cyanobacteria that can be engineered according to the methods of the present disclosure include, but are not limited to, the genus Synechocystis, Synechococcus, Thermosynechococcus, Nostoc, Prochlorococcu, Microcystis, Anabaena, Spirulina, and Gloeobacter.

[0094] Cyanobacteria, also known as blue-green algae, blue-green bacteria, or Cyanophyta, is a phylum of bacteria that obtain their energy through photosynthesis. Cyanobacteria can produce metabolites, such as carbohydrates, proteins, lipids and nucleic acids, from CO₂, water, inorganic salts and light. Any Cyanobacteria may be used according to the present disclosure.

[0095] Cyanobacteria include both unicellular and colonial species. Colonies may form filaments, sheets or even hollow balls. Some filamentous colonies show the ability to differentiate into several different cell types, such as vegetative cells, the normal, photosynthetic cells that are formed under favorable growing conditions; akinetes, the climate-resistant spores that may form when environmental conditions become harsh; and thick-walled heterocysts, which contain the enzyme nitrogenase, vital for nitrogen fixation.

[0096] Heterocysts may also form under the appropriate environmental conditions (e.g., anoxic) whenever nitrogen is necessary. Heterocyst-forming species are specialized for nitrogen fixation and are able to fix nitrogen gas, which cannot be used by plants, into ammonia (NH₃), nitrites (NO₂⁻), or nitrates (NO₃⁻), which can be absorbed by plants and converted to protein and nucleic acids.

[0097] Many Cyanobacteria also form motile filaments, called hormogonia, which travel away from the main biomass to bud and form new colonies elsewhere. The cells in a hormogonium are often thinner than in the vegetative state, and the cells on either end of the motile chain may be tapered. In order to break away from the parent colony, a hormogonium often must tear apart a weaker cell in a filament, called a necridium.

[0098] Each individual Cyanobacterial cell typically has a thick, gelatinous cell wall. Cyanobacteria differ from other gram-negative bacteria in that the quorum sensing molecules autoinducer-2 and acyl-homoserine lactones are absent. They lack flagella, but hormogonia and some unicellular species may move about by gliding along surfaces. In water columns, some Cyanobacteria float by forming gas vesicles, like in archaea.

[0099] Cyanobacteria have an elaborate and highly organized system of internal membranes that function in photosynthesis. Photosynthesis in Cyanobacteria generally uses water as an electron donor and produces oxygen as a by-product, though some Cyanobacteria may also use hydrogen sulfide, similar to other photosynthetic bacteria. Carbon dioxide is reduced to form carbohydrates via the Calvin cycle. In most forms, the photosynthetic machinery is embedded into folds of the cell membrane, called thylakoids. Due to their ability to fix nitrogen in aerobic conditions, Cyanobacteria are often found as symbionts with a number of other groups of microorganisms such as fungi (e.g., lichens), corals, pteridophytes (e.g., Azolla), and angiosperms (e.g., Gunnera), among others.

[0100] Cyanobacteria are the only group of microorganisms that are able to reduce nitrogen and carbon in aerobic conditions. The water-oxidizing photosynthesis is accomplished by coupling the activity of photosystem (PS) II and I (Z-scheme). In anaerobic conditions, Cyanobacteria are also able to use only PS I (i.e., cyclic photophosphorylation) with electron donors other than water (e.g., hydrogen sulfide, thiosulphate, or molecular hydrogen), similar to purple photosynthetic bacteria. Furthermore, Cyanobacteria share an archaeal property; the ability to reduce elemental sulfur by anaerobic respiration in the dark. The Cyanobacterial photosynthetic electron transport system shares the same compartment as the components of respiratory electron transport. Typically, the plasma membrane contains only components of the respiratory chain, while the thylakoid membrane hosts both respiratory and photosynthetic electron transport.

[0101] Phycobilisomes, attached to the thylakoid membrane, act as light harvesting proteins (e.g. antennae) for the photosystems of Cyanobacteria. The phycobilisome components (phycobiliproteins) are responsible for the blue-green pigmentation of most Cyanobacteria. Color variations are mainly due to carotenoids and phycoerythrins, which may provide the cells with a red-brownish coloration. In some Cyanobacteria, the color of light influences the composition of phycobilisomes. In green light, the cells accumulate more phycoerythrin, whereas in red light they produce more phycocyanin. Thus, the bacteria appear green in red light and red in green light. This process is known as complementary chromatic adaptation and represents a way for the cells to maximize the use of available light for photosynthesis.

[0102] In particular embodiments, the Cyanobacteria may be, e.g., a marine form of Cyanobacteria or a fresh water form of Cyanobacteria. Examples of marine forms of Cyanobacteria include, but are not limited to Synechococcus WH8102, Synechococcus RCC307, Synechococcus NKBG 15041c, and Trichodesmium. Examples of fresh water forms of Cyanobacteria include, but are not limited to, S. elongatus PCC7942, Synechocystis PCC6803, Plectonema boryanum, and Anabaena sp. Exogenous genetic material encoding the desired enzymes or polypeptides may be introduced either transiently, such as in certain self-replicating vectors, or stably, such as by integration (e.g., recombination) into the Cyanobacterium's native genome.

[0103] In other embodiments, a genetically modified Cyanobacteria of the present disclosure may be capable of growing in brackish or salt water. When using a fresh water form of Cyanobacteria, the overall net cost for production of triglycerides will depend on both the nutrients required to grow the culture and the price for freshwater. One can foresee freshwater being a limited resource in the future, and in that case it would be more cost effective to find an alternative to freshwater. Two such alternatives include: (1) the use of waste water from treatment plants; and (2) the use of salt or brackish water.

[0104] Salt water in the oceans can range in salinity between 3.1% and 3.8%, the average being 3.5%, and this is mostly, but not entirely, made up of sodium chloride (NaCl) ions. Brackish water, on the other hand, has more salinity than freshwater, but not as much as seawater. Brackish water contains between 0.5% and 3% salinity, and thus includes a large range of salinity regimes and is therefore not precisely defined. Waste water is any water that has undergone human influence. It consists of liquid waste released from domestic and commercial properties, industry, and/or agriculture and can encompass a wild range of possible contaminants at varying concentrations.

[0105] There is a broad distribution of Cyanobacteria in the oceans, with Synechococcus filling just one niche. Specifically, Synechococcus sp. PCC 7002 (formerly known as Agmenellum quadruplicatum strain PR-6) grows in brackish water, is unicellular and has an optimal growing temperature of 38° C. While this strain is well suited to grow in conditions of high salt, it will grow slowly in freshwater. In particular embodiments, the present disclosure contemplates the use of a Cyanobacteria S. elongatus PCC7942, altered in a way that allows for growth in either waste water or salt/brackish water. A S. elongatus PCC7942 mutant resistant to sodium chloride stress has been described (Bagchi, S. N. et al., Photosynth Res. 2007, 92:87-101), and a genetically modified S. elongatus PCC7942 tolerant of growth in salt water has been described (Waditee, R. et al., PNAS 2002, 99:4109-4114). According to the present disclosure, a salt water tolerant strain is capable of growing in water or media having a salinity in the range of 0.5% to 4.0% salinity, although it is not necessarily capable of growing in all salinities encompassed by this range. In one embodiment, a salt tolerant strain is capable of growth in water or media having a salinity in the range of 1.0% to 2.0% salinity. In another embodiment, a salt water tolerant strain is capable of growth in water or media having a salinity in the range of 2.0% to 3.0% salinity.

[0106] Examples of Cyanobacteria that may be utilized and/or genetically modified according to the methods described herein include, but are not limited to, Chroococcales Cyanobacteria from the genera Aphanocapsa, Aphanothece, Chamaesiphon, Chroococcus, Chroogloeocystis, Coelosphaerium, Crocosphaera, Cyanobacterium, Cyanobium, Cyanodictyon, Cyanosarcina, Cyanothece, Dactylococcopsis, Gloecapsa, Gloeothece, Merismopedia, Microcystis, Radiocystis, Rhabdoderma, Snowella, Synychococcus, Synechocystis, Thermosenechococcus, and Woronichinia; Nostacales Cyanobacteria from the genera Anabaena, Anabaenopsis, Aphanizomenon, Aulosira, Calothrix, Coleodesmium, Cyanospira, Cylindrospermosis, Cylindrospermum, Fremyella, Gleotrichia, Microchaete, Nodularia, Nostoc, Rexia, Richelia, Scytonema, Sprirestis, and Toypothrix; Oscillatoriales Cyanobacteria from the genera Arthrospira, Geitlerinema, Halomicronema, Halospirulina, Katagnymene, Leptolyngbya, Limnothrix, Lyngbya, Microcoleus, Oscillatoria, Phormidium, Planktothricoides, Planktothrix, Plectonema, Pseudoanabaena/Limnothrix, Schizothrix, Spirulina, Symploca, Trichodesmium, Tychonema; Pleurocapsales cyanobacterium from the genera Chroococcidiopsis, Dermocarpa, Dermocarpella, Myxosarcina, Pleurocapsa, Stanieria, Xenococcus; Prochlorophytes Cyanobacterium from the genera Prochloron, Prochlorococcus, Prochlorothrix; and Stigonematales cyanobacterium from the genera Capsosira, Chlorogeoepsis, Fischerella, Hapalosiphon, Mastigocladopsis, Nostochopsis, Stigonema, Symphyonema, Symphonemopsis, Umezakia, and Westiellopsis. In certain embodiments, the Cyanobacterium is from the genus Synechococcus, including, but not limited to Synechococcus bigranulatus, Synechococcus elongatus, Synechococcus leopoliensis, Synechococcus lividus, Synechococcus nidulans, and Synechococcus rubescens.

[0107] In certain embodiments, the Cyanobacterium is Anabaena sp. strain PCC 7120, Synechocystis sp. strain PCC6803, Nostoc muscorum, Nostoc ellipsosporum, or Nostoc sp. strain PCC 7120. In certain preferred embodiments, the Cyanobacterium is S. elongatus sp. strain PCC7942.

[0108] Additional examples of Cyanobacteria that may be utilized in the methods provided herein include, but are not limited to, Synechococcus sp. strains WH7803, WH8102, WH8103 (typically genetically modified by conjugation), Baeocyte-forming Chroococcidiopsis spp. (typically modified by conjugation/electroporation), non-heterocyst-forming filamentous strains Planktothrix sp., Plectonema boryanum M101 (typically modified by electroporation), and Heterocyst-forming strains Anabaena sp. strains ATCC 29413 (typically modified by conjugation), Tolypothrix sp. strain PCC 7601 (typically modified by conjugation/electroporation) and Nostoc punctiforme strain ATCC 29133 (typically modified by conjugation/electroporation).

[0109] In certain preferred embodiments, the Cyanobacterium may be S. elongatus sp. strain PCC7942 or Synechococcus sp. PCC 7002 (originally known as Agmenellum quadruplicatum).

[0110] In particular embodiments, the genetically modified, photosynthetic microorganism, e.g., Cyanobacteria, of the present disclosure may be used to produce triglycerides and/or other carbon-containing compounds from just sunlight, water, air, and minimal nutrients, using routine culture techniques of any reasonably desired scale. In particular embodiments, the present disclosure contemplates using spontaneous mutants of photosynthetic microorganisms that demonstrate a growth advantage under a defined growth condition. Among other benefits, the ability to produce large amounts of triglycerides from minimal energy and nutrient input makes the modified photosynthetic microorganism, e.g., Cyanobacteria, of the present disclosure a readily manageable and efficient source of feedstock in the subsequent production of biofuels, such as biodiesel, and other specialty chemicals, such as glycerin.

[0111] Methods of producing a modified photosynthetic microorganism, e.g., a Cyanobacterium, that has a reduced light harvesting protein production as compared to a wild-type photosynthetic microorganism, which may be used in the systems or methods of the present disclosure, include modifying the photosynthetic microorganism so that it has a reduced level of expression of one or more genes of the light harvesting protein production. In certain embodiments, the one or more genes include nblA, rpaB, pbsB, pbsC, Phycobiliprotein gene or a combination thereof. In particular embodiments, expression or activity is reduced by mutating or deleting a portion or all of the one or more genes. In particular embodiments, expression or activity is reduced by knocking out or knocking down one or more alleles of the one or more genes. In particular embodiments, expression or activity of the one or more genes is reduced by contacting the photosynthetic microorganism with an antisense oligonucleotide or interfering RNA, e.g., an siRNA, that targets the one or more genes. In particular embodiments, a vector that expresses a polynucleotide that hybridizes to the one or more genes, e.g., an antisense oligonucleotide or an siRNA is introduced into the photosynthetic microorganism.

[0112] In certain embodiments, the method comprises modifying one or more polynucleotides associated with a light harvesting protein (LHP) of Cyanobacteria to generate the modified Cyanobacteria, wherein the modified cyanobacteria have an enhanced level of photosynthetic activity as compared to corresponding wild-type Cyanobacteria. In these embodiments and other embodiments, the method comprises culturing Cyanobacteria under a stress condition; and isolating modified Cyanobacteria that have an enhanced level of photosynthetic activity as compared to corresponding wild-type Cyanobacteria, wherein the stress condition comprises culturing under increased light, culturing in metronidazole containing growth media or both.

[0113] In some embodiments, the photosynthetic activity of the Cyanobacteria is greater than photosynthetic activity of the corresponding wild-type Cyanobacteria. In certain embodiments, the photosynthetic activity is measured based on at least one of a growth rate, a level of oxygen evolution, or a biomass accumulation rate. In particular embodiments, the growth rate of the modified Cyanobacteria is at least about 110% of a growth rate of the corresponding wild-type Cyanobacteria. In particular embodiments, the growth rate of the modified Cyanobacteria is at least about 120% of a growth rate of the corresponding wild-type Cyanobacteria. In particular embodiments, the growth rate of the modified Cyanobacteria is at least about 1.5, 2, 3, 4, 5, 6, 7, 8, 9, 10 or 20-fold greater than a growth rate of the corresponding wild-type Cyanobacteria. In particular embodiments, the growth rate is measured at about day 2, 3, 4, 5, 6, 7, 8, 9, 10, 11, 12, 13, or 14 post-initiation of culturing.

[0114] In certain embodiments, the level of oxygen evolution of the modified Cyanobacteria is at least about 110% of a level of oxygen evolution of the corresponding wild-type Cyanobacteria. In particular embodiments, the level of oxygen evolution of the modified Cyanobacteria is at least about 120% of a level of oxygen evolution of the corresponding wild-type Cyanobacteria. In particular embodiments, the level of oxygen evolution of the modified Cyanobacteria is at least about 1.5, 2, 3, 4, 5, 6, 7, 8, 9, 10 or 20-fold greater than a level of oxygen evolution of the corresponding wild-type Cyanobacteria. In particular embodiments, the level of oxygen evolution is measured at about day 2, 3, 4, 5, 6, 7, 8, 9, 10, 11, 12, 13, or 14 post-initiation of culturing.

[0115] In certain embodiments, the biomass accumulation rate of the modified Cyanobacteria is at least about 110% of a biomass accumulation rate of the corresponding wild-type Cyanobacteria. In particular embodiments, the biomass accumulation rate of the modified Cyanobacteria is at least about 120% of a level of oxygen evolution of the corresponding wild-type Cyanobacteria. In particular embodiments, the biomass accumulation rate of the modified Cyanobacteria is at least about 1.5, 2, 3, 4, 5, 6, 7, 8, 9, 10 or 20-fold greater than a biomass accumulation rate of the corresponding wild-type Cyanobacteria. In particular embodiments, the biomass accumulation rate is measured at about day 2, 3, 4, 5, 6, 7, 8, 9, 10, 11, 12, 13, or 14 post-initiation of culturing.

[0116] Photosynthetic microorganisms, e.g., Cyanobacteria may be genetically modified according to techniques known in the art, e.g., to delete a portion or all of a gene or to introduce a polynucleotide that expresses a functional polypeptide. As noted above, in certain aspects, genetic manipulation in photosynthetic microorganisms, e.g., Cyanobacteria, can be performed by the introduction of non-replicating vectors which contain native photosynthetic microorganism sequences, exogenous genes of interest, and selectable markers or drug resistance genes. Upon introduction into the photosynthetic microorganism, the vectors may be integrated into the photosynthetic microorganism's genome through homologous recombination. In this way, an exogenous gene of interest and the drug resistance gene are stably integrated into the photosynthetic microorganism's genome. Such recombinants cells can then be isolated from non-recombinant cells by drug selection. Cell transformation methods and selectable markers for Cyanobacteria are also well known in the art (see, e.g., Wirth, Mol Gen Genet 216:175-7, 1989; and Koksharova, Appl Microbiol Biotechnol 58:123-37, 2002; and THE CYANOBACTERIA: MOLECULAR BIOLOGY, GENETICS, AND EVOLUTION (eds. Antonio Herrera and Enrique Flores) Caister Academic Press, 2008, each of which is incorporated by reference for their description on gene transfer into Cyanobacteria, and other information on Cyanobacteria).

[0117] Generation of deletions or mutations of any of the one or more genes associated with the light harvesting protein production or lipid biosynthesis can be accomplished according to a variety of methods known in the art, including those described and exemplified herein. For instance, the instant application describes the use of a non-replicating, selectable vector system that is targeted to the upstream and downstream flanking regions of a given gene (e.g., nblA, rpaB), and which recombines with the Cyanobacterial genome at those flanking regions to replace the endogenous coding sequence with the vector sequence. Given the presence of a selectable marker in the vector sequence, such as a drug selectable marker, Cyanobacterial cells containing the gene deletion can be readily isolated, identified and characterized. Such selectable vector-based recombination methods need not be limited to targeting upstream and downstream flanking regions, but may also be targeted to internal sequences within a given gene, as long as that gene is rendered “non-functional,” as described herein.

[0118] The generation of deletions or mutations can also be accomplished using antisense-based technology. For instance, Cyanobacteria have been shown to contain natural regulatory events that rely on antisense regulation, such as a 177-nt ncRNA that is transcribed in antisense to the central portion of an iron-regulated transcript and blocks its accumulation through extensive base pairing (see, e.g., Dühring, et al., Proc. Natl. Acad. Sci. USA 103:7054-7058, 2006), as well as a alr1690 mRNA that overlaps with, and is complementary to, the complete furA gene, which acts as an antisense RNA (α-furA RNA) interfering with furA transcript translation (see, e.g., Hernandez et al., Journal of Molecular Biology 355:325-334, 2006). Thus, the incorporation of antisense molecules targeted to genes involved in the light harvesting protein production or lipid biosynthesis would be similarly expected to negatively regulate the expression of these genes, rendering them “non-functional,” as described herein.

[0119] As used herein, antisense molecules encompass both single and double-stranded polynucleotides comprising a strand having a sequence that is complementary to a target coding strand of a gene or mRNA. Thus, antisense molecules include both single-stranded antisense oligonucleotides and double-stranded siRNA molecules.

[0120] In certain aspects, modified photosynthetic microorganisms, e.g., Cyanobacteria, that may be used in the systems and methods of the present disclosure may be prepared by: (i) modifying a photosynthetic microorganism so that it expresses a reduced amount of one or more genes associated with the light harvesting protein production or storage pathway and/or expresses an increased amount of one or more polynucleotides encoding a polypeptide associated with the light harvesting protein breakdown pathway or secretion of the light harvesting protein precursor; and (ii) introducing into the photosynthetic microorganism one or more polynucleotides encoding one or more enzymes associated with lipid biosynthesis, secretion of glucose, isobutanol and/or isopentanol biosynthesis, 4-hydroxybutyrate and/or 1,4-butanediol biosynthesis, or polyamine intermediate biosynthesis, as described elsewhere herein, and/or (iii) introducing into the photosynthetic microorganism one or more polynucleotide regulatory elements (e.g., promoters, enhancers) that increase or otherwise regulate expression of one or more endogenous enzymes associated with lipid biosynthesis, secretion of glucose, isobutanol and/or isopentanol biosynthesis, 4-hydroxybutyrate and/or 1,4-butanediol biosynthesis, or polyamine intermediate biosynthesis; and/or (iv) modifying a photosynthetic microorganism so that it expresses a reduced amount and/or a reduced-function mutant of one or more selected genes/polypeptides associated with lipid biosynthesis, as described herein. The methods may further comprise a step of: (v) selecting for photosynthetic microorganisms in which the one or more desired polynucleotides were successfully introduced, where the polyucleotides were, e.g., present in a vector the expressed a selectable marker, such as an antibiotic resistance gene. As one example, selection and isolation may include the use of antibiotic resistant markers known in the art (e.g., kanamycin, spectinomycin, and streptomycin).

[0121] Other modifications described herein may be produced using standard procedures and reagents, e.g., vectors, available in the art. Related methods are described in PCT Application No. WO 2010/075440, which is hereby incorporated by reference in its entirety.

[0122] The photosynthetic microorganisms and methods of the present disclosure may be used to produce lipids, such as fatty acids, triglycerides, alkanes/alkenes, fatty alcohols, and/or wax esters. Accordingly, the present disclosure provides methods of producing lipids comprising culturing any of the modified photosynthetic microorganisms described herein wherein the modified photosynthetic microorganism produces, secretes and/or accumulates (e.g., stores,) an increased amount of cellular lipid as compared to a corresponding wild-type or unmodified photosynthetic microorganism.

[0123] In one embodiment, the modified photosynthetic microorganism is a Cyanobacterium that produces or accumulates increased fatty acids relative to an unmodified or wild-type Cyanobacterium of the same species. In certain embodiments, the modified photosynthetic microorganism such as Cyanobacteria produces increased levels of particular fatty acids, such as C16:0 fatty acids. In certain embodiments, the modified photosynthetic microorganism is a Cyanobacterium that produces or accumulates increased wax esters relative to an unmodified or wild-type Cyanobacterium of the same species. In particular embodiments, the modified photosynthetic microorganism is a Cyanobacterium that produces or accumulates increased triglycerides relative to an unmodified or wild-type Cyanobacterium of the same species. In some embodiments, the modified photosynthetic microorganism is a Cyanobacterium that produces or accumulates increased alkanes and/or alkenes relative to an unmodified or wild-type Cyanobacterium of the same species.

[0124] In certain embodiments, the one or more introduced polynucleotides are present in one or more expression constructs. In particular embodiments, the one or more expression constructs comprises one or more inducible promoters. In certain embodiments, the one or more expression constructs are stably integrated into the genome of the modified photosynthetic microorganism. In certain embodiments, the introduced polynucleotide encoding an introduced protein is present in an expression construct comprising a weak promoter under non-induced conditions. In certain embodiments, one or more of the introduced polynucleotides are codon-optimized for expression in a Cyanobacterium, e.g., a Synechococcus elongatus.

[0125] In particular embodiments, the photosynthetic microorganism is a Synechococcus elongatus, such as Synechococcus elongatus strain PCC7942 or a salt tolerant variant of Synechococcus elongatus strain PCC7942.

[0126] In particular embodiments, the photosynthetic microorganism is a Synechococcus sp. PCC 7002 or a Synechocystis sp. PCC6803.

[0127] In particular embodiments, the modified photosynthetic microorganisms are cultured under conditions suitable for inducing expression of the introduced polynucleotide(s), e.g., wherein the introduced polynucleotide(s) comprise an inducible promoter. Conditions and reagents suitable for inducing inducible promoters are known and available in the art. Also included are the use of auto-inductive systems, for example, where a metabolite represses expression of the introduced polynucleotide, and the use of that metabolite by the microorganism over time decreases its concentration and thus its repressive activities, thereby allowing increased expression of the polynucleotide sequence.

[0128] In certain embodiments, modified photosynthetic microorganisms, e.g., Cyanobacteria, are grown under conditions favorable for producing lipids, triglycerides and/or fatty acids. In particular embodiments, light intensity is between 100 and 2000 uE/m2/s, or between 200 and 1000 uE/m2/s. In particular embodiments, the pH range of culture media is between 7.0 and 10.0. In certain embodiments, CO₂ is injected into the culture apparatus to a level in the range of 1% to 10%. In particular embodiments, the range of CO₂ is between 2.5% and 5%. In certain embodiments, nutrient supplementation is performed during the linear phase of growth. Each of these conditions may be desirable for triglyceride production.

[0129] In certain embodiments, the modified photosynthetic microorganisms are cultured, at least for some time, under static growth conditions as opposed to shaking conditions. For example, the modified photosynthetic microorganisms may be cultured under static conditions prior to inducing expression of an introduced polynucleotide (e.g., acyl-ACP reductase, ACP, LHP breakdown protein, ACCase, DGAT, fatty acyl-CoA synthetase, aldehyde dehydrogenase, alcohol dehydrogenase, aldehyde decarbonylase) and/or the modified photosynthetic microorganism may be cultured under static conditions while expression of an introduced polynucleotide is being induced, or during a portion of the time period during which expression on an introduced polynucleotide is being induced. Static growth conditions may be defined, for example, as growth without shaking or growth wherein the cells are shaken at less than or equal to 30 rpm or less than or equal to 50 rpm.

[0130] In certain embodiments, the modified photosynthetic microorganisms are cultured, at least for some time, in media supplemented with varying amounts of bicarbonate. For example, the modified photosynthetic microorganisms may be cultured with bicarbonate at 5, 10, 20, 50, 75, 100, 200, 300, 400, 500, 600, 700, 800, 900, 1000 mM bicarbonate prior to inducing expression of an introduced polynucleotide (e.g., acyl-ACP reductase, ACP, LHP breakdown protein, ACCase, DGAT, fatty acyl-CoA synthetase, alcohol dehydrogenase, aldehyde dehydrogenase, aldehyde decarbonylase) and/or the modified photosynthetic microorganism may be cultured with aforementioned bicarbonate concentrations while expression of an introduced polynucleotide is being induced, or during a portion of the time period during which expression on an introduced polynucleotide is being induced.

[0131] In related embodiments, modified photosynthetic microorganisms and methods of the present disclosure may be used in the production of a biofuel or other specialty chemical. Thus, in particular embodiments, a method of producing a biofuel comprises culturing any of the modified photosynthetic microorganisms of the present disclosure under conditions wherein the modified photosynthetic microorganism accumulates an increased amount of total cellular lipid (e.g., fatty acid, wax ester, alkane/alkene, fatty alcohol, and/or triglyceride), as compared to a corresponding wild-type photosynthetic microorganism, obtaining the cellular lipid from the microorganism, and processing the obtained cellular lipid to produce a biofuel. In another embodiment, a method of producing a biofuel comprises processing lipids (e.g., fatty acids, wax esters, alkanes/alkenes, fatty alcohols, triglycerides) produced by a modified photosynthetic microorganism of the present disclosure to produce a biofuel. In particular embodiments, the modified photosynthetic microorganism is grown under stress conditions wherein it has reduced growth but maintains photosynthesis.

[0132] Methods of processing lipids from microorganisms to produce a biofuel or other specialty chemical, e.g., biodiesel, are known and available in the art. For example, triglycerides may be transesterified to produce biodiesel. Transesterification may be carried out by any one of the methods known in the art, such as alkali-, acid-, or lipase-catalysis (see, e.g., Singh et al. Recent Pat Biotechnol. 2008, 2(2):130-143). Various methods of transesterification utilize, for example, use of a batch reactor, a supercritical alcohol, an ultrasonic reactor, or microwave irradiation (Such methods are described, for example, in Jeong and Park, Appl Biochem Biotechnol. 2006, 131(1-3):668-679; Fukuda et al., Journal of Bioscience and Engineering. 2001, 92(5):405-416; Shah and Gupta, Chemistry Central Journal. 2008, 2(1):1-9; and Carrillo-Munoz et al., J Org Chem. 1996, 61(22):7746-7749). The biodiesel may be further processed or purified, e.g., by distillation, and/or a biodiesel stabilizer may be added to the biodiesel, as described, for example, in U.S. Patent Application Publication No. 2008/0282606.

### Polypeptides

[0133] Embodiments of the present disclosure include modified photosynthetic microorganisms, such as Cyanobacteria that have modulated the expression level of certain genes involved in light harvesting proteins (LHP) synthesis, such as by mutation or deletion, leads to reduced LHP synthesis and/or storage in the modified photosynthetic microorganisms. For instance, Cyanobacteria, such as Synechococcus, which contain modulations of the nblA, rpaB, pbsB, pbsC, or Phycobiliprotein gene, individually or in various combinations, may produce and accumulate significantly reduced levels of LHP as compared to wild-type Cyanobacteria.

[0134] Further to including a reduced LHP, the modified photosynthetic microorganisms include diacylglycerol acyltransferase (DGAT) fusion proteins, comprising at least one DGAT polypeptide fused to at least one heterologous intracellular localization domain, such as a bacterial membrane-targeting domain. Such fusion proteins can be partially or fully isolated from other cellular components, or expressed, for example, in cell-free systems or a host cell, such as a modified photosynthetic microorganism.

[0135] In certain instances, the modified photosynthetic microorganisms described herein can optionally comprise any combination of one or more overexpressed or introduced lipid biosynthesis proteins and/or one or more overexpressed or introduced proteins associated with glycogen breakdown. Examples of lipid biosynthesis proteins include acyl carrier proteins (ACP), acyl ACP synthases (Aas), acyl-ACP reductases, alcohol dehydrogenases, aldehyde dehydrogenases, aldehyde decarbonylases, thioesterases (TES), acetyl coenzyme A carboxylases (ACCase), phosphatidic acid phosphatases (PAP; or phosphatidate phosphatases), triacylglycerol (TAG) hydrolases, fatty acyl-CoA synthetases, and lipases/phospholipases, as described herein. Exemplary proteins associated with glycogen breakdown are described infra.

[0136] In certain instances, photosynthetic microorganisms may optionally comprise reduced, eliminated, or non-functional expression (e.g., expression of a deletion mutant with reduced or no functional activity) of one or more endogenous lipid biosynthesis proteins. In particular aspects, for example, in the production of wax esters, modified photosynthetic microorganisms such as Synechococcus may optionally comprise reduced, eliminated, or non-functional expression of one or more aldehyde decarbonylases (e.g., orf1593), aldehyde dehydrogenases (e.g., orf0489), or both. In certain aspects, a modified photosynthetic microorganism may optionally comprise reduced, eliminated, or non-functional expression of an Aas polypeptide.

[0137] Any of these modified photosynthetic microorganisms may optionally comprise reduced, eliminated, or non-functional expression of one or more proteins associated with glycogen biosynthesis, either alone or in combination with overexpressed lipid biosynthesis proteins and/or overexpressed glycogen breakdown proteins, or in combination with any other polypeptide-related modification described herein.

[0138] As will be apparent, modified photosynthetic microorganisms of the present disclosure may comprise any combination of one or more of the additional modifications noted herein, typically as long as they express at least one intracellular localization domain-DGAT fusion protein. It is further understood that the compositions and methods of the present disclosure may be practiced using biologically active variants and/or fragments of any of the polypeptides described herein.

[0139] (i) Intracellular Localization Domain-DGAT Fusion Proteins

[0140] As noted above, embodiments of the present disclosure include intracellular localization domain-DGAT “fusion proteins,” comprising at least one DGAT polypeptide fused to at least one heterologous intracellular localization domain, such as a bacterial membrane-targeting domain.

[0141] “Fusion proteins” are defined elsewhere herein and well known in the art, as are methods of making fusion proteins. Fusion proteins may be prepared using standard techniques. For example, DNA sequences encoding the polypeptide components of a desired fusion may be assembled separately, and ligated into an appropriate expression vector. The 3′ end of the DNA sequence encoding one polypeptide component can be ligated, with or without a peptide linker (described below), to the 5′ end of a DNA sequence encoding the second (or third, fourth, etc.) polypeptide component so that the reading frames of the sequences are in phase. This permits translation into a single fusion protein that retains the biological activity of both component polypeptides.

[0142] The ligated DNA sequences may be operably linked to suitable transcriptional or translational regulatory elements. The regulatory elements responsible for expression of DNA are typically located 5′ to the DNA sequence encoding the first polypeptide (e.g., the membrane-targeting domain). Similarly, stop codons required to end translation and transcription termination signals are typically present 3′ to the DNA sequence encoding the second (or third, fourth, etc.) polypeptide.

[0143] In the DGAT fusion proteins described herein, the intracellular localization or targeting domain can be fused to the N-terminus of the DGAT polypeptide, the C-terminus of the DGAT polypeptide, internally, or any combination thereof. For internal fusions, the intracellular localization or targeting domain can be fused to the DGAT polypeptide within the N-terminal region (e.g., within about the first 2, 3, 4, 5, 6, 7, 8, 9, 10, 20, 30, 40, 50, 60, 70, 80, 90, 100 or so amino acids), at an internal region (between the N-terminal and C-terminal regions), and/or within the C-terminal region (e.g., within about the last 2, 3, 4, 5, 6, 7, 8, 9, 10, 20, 30, 40, 50, 60, 70, 80, 90, 100 or so amino acids). Preferably, the intracellular localization or targeting domain is fused to the N-terminus of the DGAT polypeptide, or near the N-terminus, for example, within about the 1-100 amino acids. In particular embodiments, the intracellular localization or targeting domain is fused to the second amino acid of a DGAT polypeptide, resulting in the removal of the first residue (the methionine residue of the AUG codon).

[0144] The intracellular localization domains described herein alter the intracellular localization of the DGAT protein(s) to which they are fused. Such alterations can thus be measured relative to the localization of the corresponding wild-type DGAT protein(s). In the most general aspects, a DGAT fusion protein is “targeted to” or “selectively localizes” to one or more defined intracellular region(s) of a photosynthetic microorganism, where at least about 30%, 40%, 50%, 60%, 70%, 80%, 90%, 95%, 98%, or nearly 100% of the DGAT fusion protein can be found associated with the defined intracellular region(s), relative to a cytoplasmic or a soluble fraction of the microorganism. In particular aspects, the intracellular region is one or more of the plasma membrane, a thylakoid, a vesicle, a lipid body, a glycogen granule, a polyhydroxybutyrate (PHB) body, a carboxysome, a cyanophycin granule, and/or an intracellular membrane, such as an intracellular membrane associated with a thylakoid, vesicle, lipid body, glycogen granule, PHB body, carboxysome, and/or cyanophycin granule. In certain embodiments, the enzymatic domain(s) of the DGAT fusion protein selectively localizes to the cytoplasmic side of the intracellular region(s) or associated membranes.

[0145] In more particular embodiments, a DGAT fusion protein is “targeted to” or “selectively localizes” to one or more membrane(s) of a photosynthetic microorganism, where at least about 30%, 40%, 50%, 60%, 70%, 80%, 90%, 95%, 98%, or nearly 100% of the fusion protein can be found associated with at least one membrane (e.g., a membrane fraction) upon expression in a given photosynthetic microorganism (e.g., Cyanobacteria), relative to other cellular spaces, such as a cytoplasmic or soluble fraction of the cell. Examples of membranes include the plasma membrane and any intracellular membranes, such as intracellular membranes associated with a thylakoid, vesicle, lipid body, glycogen granule, PHB body, carboxysome, and/or cyanophycin granule. In some embodiments, the enzymatic domain(s) of the DGAT fusion protein selectively localize to the cytoplasmic side of the membrane.

[0146] In certain embodiments, a DGAT fusion protein is “targeted to” or “selectively localizes” to the plasma membrane of a photosynthetic microorganism, where at least about 30%, 40%, 50%, 60%, 70%, 80%, 90%, 95%, 98%, or nearly 100% of the fusion protein can be found at the plasma membrane (or associated with the plasma membrane) upon expression in a given photosynthetic microorganism (e.g., Cyanobacteria), relative to other cellular spaces, such as the cytoplasm, vesicles, lipid bodies, thylakoids, glycogen granules, PHB bodies, carboxysomes, cyanophycin granules, other intracellular membranes (e.g., thylakoid membranes, lipid body membranes, vesicle membranes), or any combination thereof. Thylakoids consist of a thylakoid membrane surrounding a thylakoid lumen, and are the site of photosynthesis. In certain of these and related embodiments, the enzymatic domain(s) of the DGAT fusion protein selectively localize to the cytoplasmic side of the plasma membrane.

[0147] In particular aspects, the fusion to a heterologous intracellular localization domain limits the potential for DGAT-mediated photosystem disruption, generation of reactive oxygen species, and loss of cell viability, and thereby improves the cell growth phenotype of DGAT-expressing and lipid-producing photosynthetic microorganisms.

[0148] Intracellular Localization Domains. Generally, the intracellular localization domain sequences of the DGAT fusion proteins described herein can be obtained from any one or more signal or other sequences that selectively localize a given protein to a defined intracellular region (for instance, relative to dispersal throughout the cytoplasm), such as the plasma membrane, a thylakoid, a vesicle, a lipid body, a glycogen granule, a PHB body, a carboxysome, a cyanophycin granule, or an intracellular membrane. Particular examples thus include membrane-, thylakoid-, vesicle-, lipid body-, glycogen granule-, polyhydroxybutyrate (PHB) body-, carboxysome-, and cyanophycin granule-targeting domains, including domains that target DGAT to the membranes associated with these intracellular regions. In specific instances, the intracellular localization domain selectively localizes the active domain(s) of DGAT to the cytoplasmic side of the intracellular region, so that DGAT can interact with lipid-producing substrates in the cytoplasm.

[0149] The intracellular localization domain can be any length that is sufficient to selectively localize the DGAT fusion protein(s) to an intracellular region of a membrane, such as the plasma membrane, and/or alter its relation to other cell membranes or substrates, and allow the enzymatic portions of the DGAT polypeptide to interact with lipid-producing substrates in the cytoplasm. For instance, in certain embodiments, the intracellular localization domain can be anywhere from about 10-1000 amino acids in length, including about 10, 15, 20, 25, 30, 35, 40, 45, 50, 55, 60, 65, 70, 75, 80, 85, 90, 95, 100, 110, 120, 130, 140, 150, 160, 170, 180, 190, 200, 210, 220, 230, 240, 250, 260, 270, 280, 290, 300, 310, 320, 330, 340, 350, 360, 370, 380, 390, 400, 410, 420, 430, 440, 450, 460, 470, 480, 490, 500, 510, 520, 530, 540, 550, 560, 570, 580, 590, 600, 700, 710, 720, 730, 740, 750, 760, 770, 780, 790, 800, 810, 820, 830, 840, 850, 860, 870, 880, 890, 900, 910, 920, 930, 940, 950, 960, 970, 980, 990, 1000 or more amino acids in length, including all integers and ranges in between (e.g., 20-100, 30-100, 40-100, 50-100, 20-200, 30-200, 40-200, 50-200 amino acids in length).

[0150] In particular embodiments, the intracellular localization domain is a membrane-targeting or plasma membrane (PM)-targeting domain. Such membrane-targeting sequences can be obtained or derived from any combination of N-terminal leader sequence(s), transmembrane domain sequence(s), and/or integral membrane sequence(s) of a bacterial membrane protein, such as a bacterial plasma membrane protein. In certain instances, such bacterial plasma membrane proteins (in their endogenous state) selectively localize to the plasma membrane, and are characterized by having at least one C-terminal region that is localized to the cytoplasmic side of a bacterial plasma membrane, and/or the periplasmic side of the outer membrane (for plasma membrane proteins derived from gram-negative bacteria).

[0151] A bacterial plasma membrane protein “selectively localizes” to the plasma membrane where at least about 30%, 40%, 50%, 60%, 70%, 80%, 90%, 95%, 98%, or nearly 100% of the protein can be found at the plasma membrane upon (preferably endogenous) expression in the bacteria from which it is derived (e.g., gram-positive bacteria, gram-negative bacteria, photosynthetic bacteria, Cyanobacteria), relative to other cellular spaces, such as the cytoplasm, the cell wall, other cellular ‘organelles’ or membranes, such as thylakoid membranes for certain photosynthetic bacteria, or any combination thereof.

[0152] In certain embodiments, the membrane-targeting or PM-targeting domain may comprise an amino acid sequence of an N-terminal leader sequence, an amino acid sequence of one or more transmembrane domains (e.g., 1, 2, 3, 4, 5, 6, 7, 8, 9, 10 or more transmembrane domains), an amino acid sequence of one or more integral membrane domains, or any combination thereof. When combined, the sequences of the N-terminal leader, the transmembrane domain(s), and/or the integral membrane domain(s) can be from the same or different bacterial plasma membrane protein(s).

[0153] Membrane-targeting or PM-targeting domain sequences can be obtained from (or derived from) the signal sequences, transmembrane domains, or integral membrane domains of any variety of bacterial membrane proteins. For instance, the bacterial membrane protein can be an integral membrane protein (IMP), such as a transmembrane protein (TP). In some instances, the membrane-targeting domain is obtained from a single-pass transmembrane protein, having only one domain that spans the lipid bilayer of the plasma membrane, or a multi-pass transmembrane protein, having about 2, 3, 4, 5, 6, 7, 8, 9, 10 or more domains that span the lipid bilayer of the plasma membrane. For the latter, the membrane-targeting domain can comprise any one or more of the multiple transmembrane domains. In certain aspects, the membrane-targeting domain or transmembrane domain (TMD) can comprise an alpha-helical transmembrane structure, or a beta-barrel transmembrane structure, the latter typically deriving from gram-negative outer membrane proteins.

[0154] In some embodiments, the membrane-targeting or PM-targeting domain does not span the entire lipid bilayer, but inserts into or attaches to the cytoplasmic side of the membrane, such as the plasma membrane. Examples include membrane-targeting domains that interact with the membrane by an amphipathic helix (e.g., parallel to the membrane plane), membrane-targeting domains that interact with the membrane by a hydrophobic loop, and membrane-targeting domains that interact with the membrane by electrostatic or ionic interactions, for example, through calcium ions.

[0155] In some embodiments, the membrane-targeting domain sequence is obtained from a membrane protein or plasma membrane protein of one or more gram-negative bacteria, gram-positive bacteria, or other bacteria, such as a Cyanobacteria. Exemplary bacteria are described elsewhere herein and known in the art.

[0156] In particular embodiments the membrane-targeting or PM-targeting domain sequence is obtained from a membrane protein or plasma membrane protein of a photosynthetic bacteria, such as a Cyanobacteria from the genera Aphanocapsa, Aphanothece, Chamaesiphon, Chroococcus, Chroogloeocystis, Coelosphaerium, Crocosphaera, Cyanobacterium, Cyanobium, Cyanodictyon, Cyanosarcina, Cyanothece, Dactylococcopsis, Gloecapsa, Gloeothece, Merismopedia, Microcystis, Radiocystis, Rhabdoderma, Snowella, Synychococcus, Synechocystis, Thermosenechococcus, and Woronichinia; Nostacales Cyanobacteria from the genera Anabaena, Anabaenopsis, Aphanizomenon, Aulosira, Calothrix, Coleodesmium, Cyanospira, Cylindrospermosis, Cylindrospermum, Fremyella, Gleotrichia, Microchaete, Nodularia, Nostoc, Rexia, Richelia, Scytonema, Sprirestis, Toypothrix, Oscillatoriales; Cyanobacteria from the genera Arthrospira, Geitlerinema, Halomicronema, Halospirulina, Katagnymene, Leptolyngbya, Limnothrix, Lyngbya, Microcoleus, Oscillatoria, Phormidium, Planktothricoides, Planktothrix, Plectonema, Pseudoanabaena/Limnothrix, Schizothrix, Spirulina, Symploca, Trichodesmium, Tychonema; Pleurocapsales cyanobacterium from the genera Chroococcidiopsis, Dermocarpa, Dermocarpella, Myxosarcina, Pleurocapsa, Stanieria, Xenococcus, Prochlorophytes; Cyanobacterium from the genera Prochloron, Prochlorococcus, Prochlorothrix; and Stigonematales cyanobacterium from the genera Capsosira, Chlorogeoepsis, Fischerella, Hapalosiphon, Mastigocladopsis, Nostochopsis, Stigonema, Symphyonema, Symphonemopsis, Umezakia, and Westiellopsis. In certain embodiments, the Cyanobacterium is from the genus Synechococcus, including, but not limited to Synechococcus bigranulatus, Synechococcus elongatus, Synechococcus leopoliensis, Synechococcus lividus, Synechococcus nidulans, and Synechococcus rubescens. In certain embodiments, the membrane-targeting domain sequence is derived from a plasma membrane protein from S. elongatus sp. strain PCC7942 or Synechococcus sp. PCC 7002 (originally known as Agmenellum quadruplicatum).

[0157] In some embodiments, the membrane protein is a plasma membrane receptor protein, such as a chemoreceptor or chemotaxis protein. Particular examples include integral membrane chemoreceptors, e.g., transmembrane chemoreceptors. Examples of chemoreceptors or chemotaxis proteins include methyl-accepting chemotaxis proteins and amino acid chemotaxis receptors, such as serine chemotaxis receptors (e.g., Tsr receptor from Escherichia coli) and aspartate chemotaxis receptors. The membrane-targeting domain can thus be obtained from the signal sequence and/or transmembrane domains of any one or more of such bacterial plasma membrane receptors.

[0158] In particular embodiments, the membrane-targeting domain is obtained from (or derived from) a methyl-accepting chemotaxis protein (MCP). MCPs can be classified by topology type (see Zhulin, Adv Microb Physiol. 45:157-198, 2001) and signaling domain class (see Alexander and Zhulin, PNAS USA. 104:2885-2890, 2007). Topology type I MCPs have large periplasmic ligand-binding domains and an elongated cytoplasmic region consisting of a HAMP domain (i.e., histidine kinases, adenylyl cyclases, methyl-binding proteins, and phosphatases) followed by a signaling domain, which in turn is composed of “methylation,” “flexible bundle,” and “signaling” sub-domains (see Alexander and Zhulin, supra; and Hazelbauer et al., Trends Biochem Sci. 33:9-19, 2008). MCPs cluster together with other chemotaxis proteins in large arrays at the cell pole.

[0159] MCP arrays from variety of bacteria have been well-characterized, including, for example, E. coli, C. crescentus, Thermotoga maritima, Magnetospirillum magneticum, Rhodobacter sphaeroides, Treponema primitia, Listeria monocytogenes, Helicobacter hepaticus, Campylobacter jejuni, Acetonema longum, Borrelia burgdorferi, Halothiobacillus neapolitanus, and Campylobacter jejuni (see Briegel et al., PNAS USA. 106:17181-17186, 2009). The membrane-targeting domain can thus be derived from the signal sequence and/or transmembrane domains of an MCP from any one or more of these bacteria, or an MCP from any other bacteria described herein or known in the art.

[0160] In certain embodiments, the MCP is encoded by PCC7942-0858 or PCC7942-1015 from S. elongatus. The polypeptide and polynucleotide sequence of the S. elongatus PCC7942-0858 MCP are set forth in SEQ ID NOS:199 and 200, respectively, and the polypeptide and polynucleotide sequence of the S. elongatus PCC7942-1015 MCP are set forth in SEQ ID NOS:201 and 202, respectively.

[0161] In some embodiments, the membrane-targeting domain comprises or consists essentially of the N-terminal leader sequence, the first (N-terminal) transmembrane domain, and/or the second transmembrane domain of PCC7942-0858, singly or in combination together. In certain instances, the bacterial membrane-targeting domain comprises or consists essentially of about the N-terminal 43-53 amino acids of the MCP encoded by PCC7942-0858, for example, about residues 1-43, 4-44, 1-45, 1-46, 1-47, 1-48, 1-49, 1-50, 1-51, 1-52, 1-53, 1-54, 1-55, 1-56, 1-57, 1-58, 1-59, 1-60 of SEQ ID NO:199. In specific instances, the bacterial membrane-targeting domain comprises or consists essentially of the N-terminal signal sequence and the two N-terminally proximal TMDs of the MCP encoded by PCC7942-0858, for example, about residues 1-141 of SEQ ID NO:199.

[0162] DGAT Polypeptides. As used herein, a “diacylglycerol acyltransferase” (DGAT) polypeptide includes any protein, polypeptide or peptide, obtainable from any cell source, which demonstrates the ability to catalyze the production of triacylglycerol from 1,2-diacylglycerol and fatty acyl substrates under enzyme reactive conditions, in addition to any naturally-occurring (e.g., allelic variants, orthologs) or non-naturally occurring variants of a diacylglycerol acyltransferase sequence having such ability. DGAT polypeptides of the present disclosure also include bi-functional proteins, such as those bi-functional proteins that exhibit a DGAT activity as well as a CoA:fatty alcohol acyltransferase activity, e.g., a wax ester synthesis (WES) activity, as often found in many TAG producing bacteria.

[0163] Diacylglycerol acyltransferases (DGATs) are members of the O-acyltransferase superfamily, which esterify either sterols or diacyglycerols in an oleoyl-CoA-dependent manner. DGAT in particular esterifies diacylglycerols, which reaction represents the final enzymatic step in the production of triacylglycerols in plants, fungi and mammals. Specifically, DGAT is responsible for transferring an acyl group from acyl-coenzyme-A to the sn-3 position of 1,2-diacylglycerol (DAG) to form triacylglycerol (TAG). DGAT is an integral membrane protein that has been generally described in Harwood (Biochem. Biophysics. Acta, 1301:7-56, 1996), Daum et al. (Yeast 16:1471-1510, 1998), and Coleman et al. (Annu. Rev. Nutr. 20:77-103, 2000) (each of which are herein incorporated by reference).

[0164] In plants and fungi, DGAT is associated with the membrane and lipid body fractions. In catalyzing TAGs, DGAT contributes mainly to the storage of carbon used as energy reserves. In animals, however, the role of DGAT is more complex. DGAT not only plays a role in lipoprotein assembly and the regulation of plasma triacylglycerol concentration (Bell, R. M., et al.), but participates as well in the regulation of diacylglycerol levels (see Brindley, Biochemistry of Lipids, Lipoproteins and Membranes, eds. Vance, D. E. & Vance, J. E. (Elsevier, Amsterdam), 171-203; and Nishizuka, Science 258:607-614, 1992, each of which are incorporated by reference).

[0165] In eukaryotes, at least three independent DGAT gene families (DGAT1, DGAT2, and PDAT) have been described that encode proteins with the capacity to form TAG. Yeast contain all three of DGAT1, DGAT2, and PDAT, but the expression levels of these gene families varies during different phases of the life cycle (Dahlqvst, A., et al. Proc. Natl. Acad. Sci. USA 97:6487-6492, 2000, incorporated by reference).

[0166] In prokaryotes, WS/DGAT from Acinetobacter calcoaceticus ADP1 represents the first identified member of a widespread class of bacterial wax ester and TAG biosynthesis enzymes. This enzyme comprises a putative membrane-spanning region but shows no sequence homology to the DGAT1 and DGAT2 families from eukaryotes. Under in vitro conditions, WS/DGAT shows a broad capability of utilizing a large variety of fatty alcohols, and even thiols as acceptors of the acyl moieties of various acyl-CoA thioesters. WS/DGAT acyltransferase enzymes exhibit extraordinarily broad substrate specificity. Genes for homologous acyltransferases have been found in almost all bacteria capable of accumulating neutral lipids, including, for example, Acinetobacter baylii, A. baumanii, and M. avium, and M. tuberculosis CDC1551, in which about 15 functional homologues are present (see, e.g., Daniel et al., J. Bacteriol. 186:5017-5030, 2004; and Kalscheuer et al, J. Biol. Chem. 287:8075-8082, 2003).

[0167] DGAT proteins may utilize a variety of acyl substrates in a host cell, including fatty acyl-CoA and fatty acyl-ACP molecules. In addition, the acyl substrates acted upon by DGAT enzymes may have varying carbon chain lengths and degrees of saturation, although DGAT may demonstrate preferential activity towards certain molecules.

[0168] Like other members of the eukaryotic 0-acyltransferase superfamily, eukaryotic DGAT polypeptides typically contain a FYxDWWN (SEQ ID NO:15) heptapeptide retention motif, as well as a histidine (or tyrosine)-serine-phenylalanine (H/YSF) tripeptide motif, as described in Zhongmin et al. (Journal of Lipid Research, 42:1282-1291, 2001) (herein incorporated by reference). The highly conserved FYxDWWN (SEQ ID NO:15) is believed to be involved in fatty Acyl-CoA binding. In certain instances, the DGAT polypeptide portion of the fusion proteins described herein may thus comprise one or more these motifs.

[0169] DGAT polypeptides utilized according to the fusion proteins described herein may be isolated from any organism, including eukaryotic and prokaryotic organisms. Eukaryotic organisms having a DGAT gene are well-known in the art, and include various animals (e.g., mammals, fruit flies, nematodes), plants, parasites, and fungi (e.g., yeast such as S. cerevisiae and Schizosaccharomyces pombe). Examples of prokaryotic organisms include certain actinomycetes, a group of Gram-positive bacteria with high G+C ratio, such as those from the representative genera Actinomyces, Arthrobacter, Corynebacterium, Frankia, Micrococcus, Mocrimonospora, Mycobacterium, Nocardia, Propionibacterium, Rhodococcus and Streptomyces. Particular examples of actinomycetes that have one or more genes encoding a DGAT activity include, for example, Mycobacterium tuberculosis, M. avium, M. smegmatis, Micromonospora echinospora, Rhodococcus opacus, R. ruber, and Streptomyces lividans.

[0170] Additional examples of prokaryotic organisms that encode one or more enzymes having a DGAT activity include members of the genera Acinetobacter, such as A. calcoaceticus, A. baumanii, A. baylii, and members of the generua Alcanivorax. In certain embodiments, a DGAT polypeptide is from Acinetobacter baylii sp. ADP1, a gram-negative triglyceride forming prokaryote, which contains a well-characterized DGAT (AtfA).

[0171] In particular embodiments, the DGAT polypeptide is an Acinetobacter DGAT (ADGAT), a Streptomyces DGAT, or an Alcanivorax DGAT. In certain embodiments, the DGAT polypeptide comprises or consists of a polypeptide sequence set forth in any one of SEQ ID NOs:58, 59, 60, or 61, or a fragment or variant thereof. SEQ ID NO:58 is the sequence of DGATn; SEQ ID NO:59 is the sequence of Streptomyces coelicolor DGAT (ScoDGAT or SDGAT); SEQ ID NO:60 is the sequence of Alcanivorax borkumensis DGAT (AboDGAT); and SEQ ID NO:61 is the sequence of DGATd.

[0172] In certain embodiments, the modified photosynthetic microorganisms of the present disclosure may express two or more intracellular localization domain-DGAT fusion proteins. The DGAT polypeptides may by the same or different. In particular embodiments, the following intracellular localization domain-DGAT fusions are co-expressed in modified photosynthetic microorganisms, e.g., Cyanobacteria, using one of the following double DGAT strains: ADGATd::ScoDGAT; ADGATd(NS1)::ADGATd(NS2); ADGATn(NS1)::ADGATn(NS2); ADGATn(NS1)::SDGAT(NS2); SDGAT(NS1)::ADGATn(NS2); SDGAT(NS1)::SDGAT(NS2). For the NS1 vector, pAM2291, EcoRl follows ATG and is part of the open reading frame (ORF). For the NS2 vector, pAM1579, EcoRl follows ATG and is part of the ORF. A DGAT having EcoRl nucleotides following ATG may be cloned in either pAM2291 or pAM1579; such a DGAT is referred to as ADGATd. Other embodiments utilize the vector, pAM2314FTrc3, which is an NS1 vector with Nde/Bglll sites, or the vector, pAM1579FTrc3, which is the NS2 vector with Nde/Bglll sites. A DGAT without EcoRl nucleotides may be cloned into either of these last two vectors. Such a DGAT is referred to as ADGATn. Modified photosynthetic microorganisms expressing different DGATs express TAGs having different fatty acid compositions. Accordingly, certain embodiments contemplate expressing two or more different intracellular localization domain-DGAT fusions, in order to produce TAGs having varied fatty acid compositions.

[0173] Peptide Linkers. In certain embodiments, a peptide linker sequence may be employed to separate the DGAT polypeptide(s) and the heterologous intracellular localization domain(s) by a distance sufficient to ensure that each polypeptide folds into its desired secondary and tertiary structures. Such a peptide linker sequence can be incorporated into the fusion protein using standard techniques well known in the art.

[0174] Certain peptide linker sequences may be chosen based on the following exemplary factors: (1) their ability to adopt a flexible extended conformation; (2) their inability to adopt a secondary structure that could interact with functional epitopes on the first and second polypeptides; (3) their physiological stability; and (4) the lack of hydrophobic or charged residues that might react with the polypeptide functional epitopes, or other features. See, e.g., George and Heringa, J Protein Eng. 15:871-879, 2002.

[0175] The linker sequence can be essentially any length, but is generally from about 1 to about 300 amino acids in length. Particular linkers can have an overall amino acid length of about 1-300 amino acids, 1-250, 1-200 amino acids, 1-150 amino acids, 1-100 amino acids, 1-90 amino acids, 1-80 amino acids, 1-70 amino acids, 1-60 amino acids, 1-50 amino acids, 1-40 amino acids, 1-30 amino acids, 1-20 amino acids, 1-10 amino acids, 1-5 amino acids, 1-4 amino acids, 1-3 amino acids, or about 1, 2, 3, 4, 5, 6, 7, 8, 9, 10, 11, 12, 13, 14, 15, 16 , 17, 18, 19, 20, 21, 22, 23, 24, 25, 26, 27, 28, 29, 30, 31, 32, 33, 34, 35, 36, 37, 38, 39, 40, 41, 42, 43, 44, 45, 46, 47, 48, 49, 50, 60, 70, 80, 90, 100, 110, 120, 130, 140, 150, 160, 170, 180, 190, 200, 210, 220, 230, 240, 250, 260, 270, 280, 290, 300 or more amino acids in length.

[0176] Certain amino acid sequences which may be usefully employed as linkers include those disclosed in Maratea et al., Gene 40:39-46, 1985; Murphy et al., PNAS USA. 83:8258-8262, 1986; U.S. Pat. No. 4,935,233 and U.S. Pat. No. 4,751,180. Particular peptide linker sequences contain Gly, Ser, and/or Asn residues. Other near neutral amino acids, such as Thr and Ala may also be employed in the peptide linker sequence, if desired.

[0177] Certain exemplary linkers include Gly, Ser and/or Asn-containing linkers, as follows: [G]ₓ, [S]ₓ, [N]ₓ, [GS]ₓ, [GGS]ₓ, [GSS]ₓ, [GSGS]ₓ (SEQ ID NO:203), [GGSG]ₓ (SEQ ID NO:204), [GGGS]ₓ (SEQ ID NO:205), [GGGGS]ₓ (SEQ ID NO:206), [GN]ₓ, [GGN]ₓ, [GNN]ₓ, [GNGN]ₓ (SEQ ID NO:207), [GGNG]ₓ (SEQ ID NO:208), [GGGN]ₓ (SEQ ID NO:209), [GGGGN]ₓ (SEQ ID NO:210) linkers, whereₓ is 1, 2, 3, 4, 5, 6, 7, 8, 9, 10, 11, 12, 13, 14, 15, 16, 17, 18, 19, 20, 25, 30, 40, 50 or more. Other combinations of these and related amino acids will be apparent to persons skilled in the art.

[0178] In certain embodiments, however, any one or more of the peptide linkers are optional. For instance, linker sequences may not required when the bacterial membrane protein (from which the membrane- or PM-targeting domain is derived) and the DGAT polypeptides have non-essential regions (e.g., N-terminal and/or C-terminal amino acids, or for the plasma membrane proteins, regions just downstream of the signal sequences and/or transmembrane domains) that can be used to separate the functional domains and prevent steric interference.

[0179] (ii) Lipid Biosynthesis Proteins

[0180] In various embodiments, modified photosynthetic microorganisms of the present disclosure further comprise one or more exogenous (e.g., introduced) or overexpressed nucleic acids that encode a lipid biosynthesis protein, e.g., a polypeptide having an activity associated with triglyceride biosynthesis or fatty acid biosynthesis, including but not limited to any of those described herein. In particular instances, a modified photosynthetic microorganism may comprise reduced expression and/or activity of one or more selected lipid biosynthesis proteins. Certain of these proteins are described in greater detail below.

[0181] In particular embodiments, the exogenous nucleic acid does not comprise a nucleic acid sequence that is native to the microorganism's genome. In some embodiments, the exogenous nucleic acid comprises a nucleic acid sequence that is native to the microorganism's genome, but it has been introduced into the microorganism, e.g., in a vector or by molecular biology techniques, for example, to increase expression of the nucleic acid and/or its encoded polypeptide in the microorganism. In certain embodiments, the expression of a native or endogenous nucleic acid and its corresponding protein can be increased by introducing a heterologous promoter upstream of the native gene. As noted above, lipid biosynthesis proteins can be involved in triglyceride biosynthesis, fatty acid synthesis, wax ester synthesis, or any combination thereof.

[0182] Triglyceride Biosynthesis. Triglycerides, or triacylglycerols (TAGs), consist primarily of glycerol esterified with three fatty acids, and yield more energy upon oxidation than either carbohydrates or proteins. Triglycerides provide an important mechanism of energy storage for most eukaryotic organisms. In mammals, TAGs are synthesized and stored in several cell types, including adipocytes and hepatocytes (Bell et al. Annu. Rev. Biochem. 49:459-487, 1980) (incorporated by reference). In plants, TAG production is mainly important for the generation of seed oils.

[0183] In contrast to eukaryotes, the observation of triglyceride production in prokaryotes has been limited to certain actinomycetes, such as members of the genera Mycobacterium, Nocardia, Rhodococcus and Streptomyces, in addition to certain members of the genus Acinetobacter. In certain Actinomycetes species, triglycerides may accumulate to nearly 80% of the dry cell weight, but accumulate to only about 15% of the dry cell weight in Acinetobacter. In general, triglycerides are stored in spherical lipid bodies, with quantities and diameters depending on the respective species, growth stage, and cultivation conditions. For example, cells of Rhodococcus opacus and Streptomyces lividans contain only few TAGs when cultivated in complex media with a high content of carbon and nitrogen; however, the lipid content and the number of TAG bodies increase drastically when the cells are cultivated in mineral salt medium with a low nitrogen-to-carbon ratio, yielding a maximum in the late stationary growth phase. At this stage, cells can be almost completely filled with lipid bodies exhibiting diameters ranging from 50 to 400 nm. One example is R. opacus PD630, in which lipids can reach more than 70% of the total cellular dry weight.

[0184] In bacteria, TAG formation typically starts with the docking of a diacylglycerol acyltransferase enzyme to the plasma membrane, followed by formation of small lipid droplets (SLDs). These SLDs are only some nanometers in diameter and remain associated with the membrane-docked enzyme. In this phase of lipid accumulation, SLDs typically form an emulsive, oleogenous layer at the plasma membrane. During prolonged lipid synthesis, SLDs leave the membrane-associated acyltransferase and conglomerate to membrane-bound lipid prebodies. These lipid prebodies reach distinct sizes, e.g., about 200 nm in A. calcoaceticus and about 300 nm in R. opacus, before they lose contact with the membrane and are released into the cytoplasm. Free and membrane-bound lipid prebodies correspond to the lipid domains occurring in the cytoplasm and at the cell wall, as observed in M. smegmatis during fluorescence microscopy and also confirmed in R. opacus PD630 and A. calcoaceticus ADP1 (see, e.g., Christensen et al., Mol. Microbiol. 31:1561-1572, 1999; and Wältermann et al., Mol. Microbiol. 55:750-763, 2005). Inside the lipid prebodies, SLDs coalesce with each other to form the homogenous lipid core found in mature lipid bodies, which often appear opaque in electron microscopy.

[0185] The compositions and structures of bacterial TAGs vary considerably depending on the microorganism and on the carbon source. In addition, unusual acyl moieties, such as phenyldecanoic acid and 4,8,12 trimethyl tridecanoic acid, may also contribute to the structural diversity of bacterial TAGs (see, e.g., Alvarez et al., Appl Microbiol Biotechnol. 60:367-76, 2002).

[0186] As with eukaryotes, the main function of TAGs in prokaryotes is to serve as a storage compound for energy and carbon. TAGs, however, may provide other functions in prokaryotes. For example, lipid bodies may act as a deposit for toxic or useless fatty acids formed during growth on recalcitrant carbon sources, which must be excluded from the plasma membrane and phospholipid (PL) biosynthesis. Furthermore, many TAG-accumulating bacteria are ubiquitous in soil, and in this habitat, water deficiency causing dehydration is a frequent environmental stress. Storage of evaporation-resistant lipids might be a strategy to maintain a basic water supply, since oxidation of the hydrocarbon chains of the lipids under conditions of dehydration would generate considerable amounts of water. Cyanobacteria such as Synechococcus, however, do not produce triglycerides, because these organisms lack the enzymes necessary for triglyceride biosynthesis.

[0187] Triglycerides are synthesized from fatty acids and glycerol. As one mechanism of triglyceride (TAG) synthesis, sequential acylation of glycerol-3-phosphate via the “Kennedy Pathway” leads to the formation of phosphatidate. Phosphatidate is then dephosphorylated by the enzyme phosphatidate phosphatase to yield 1,2 diacylglycerol (DAG). Using DAG as a substrate, at least three different classes of enzymes are capable of mediating TAG formation. As one example, an enzyme having diacylglycerol acyltransferase (DGAT) activity catalyzes the acylation of DAG using acyl-CoA as a substrate. Essentially, DGAT enzymes combine acyl-CoA with 1,2 diacylglycerol molecule to form a TAG. As an alternative, Acyl-CoA-independent TAG synthesis may be mediated by a phospholipid:DAG acyltransferase found in yeast and plants, which uses phospholipids as acyl donors for DAG esterification. Third, TAG synthesis in animals and plants may be mediated by a DAG-DAG-transacylase, which uses DAG as both an acyl donor and acceptor, yielding TAG and monoacylglycerol.

[0188] Modified photosynthetic microorganisms, e.g., Cyanobacteria, of the present disclosure may comprise one or more exogenous polynucleotides encoding polypeptides comprising one or more of the polypeptides and enzymes described herein.

[0189] Since wild type Cyanobacteria do not typically encode the enzymes necessary for triglyceride synthesis, such as the enzymes having diacylglycerol acyltransferase activity, embodiments of the present disclosure include genetically modified Cyanobacteria that comprise polynucleotides encoding one or more DGAT fusion proteins, optionally in combination with one or more enzymes having a fatty acyl-CoA synthetase activity. In particular embodiments, the one or more exogenous polynucleotides encode a DGAT fusion protein described herein and a fatty acyl-CoA synthetase, or a functional variant or fragment thereof.

[0190] Moreover, since triglycerides are typically formed from fatty acids, the level of fatty acid biosynthesis in a cell may limit the production of triglycerides. Increasing the level of fatty acid biosynthesis may, therefore, allow increased production of triglycerides. As discussed below, acetyl-CoA carboxylase catalyzes the commitment step to fatty acid biosynthesis. Thus, certain embodiments of the present disclosure include Cyanobacterium, and methods of use thereof, comprising polynucleotides that encode one or more enzymes having acetyl-CoA carboxylase activity to increase fatty acid biosynthesis and lipid production, in addition to one or more DGAT fusion proteins and optionally one or more enzymes having fatty acyl-CoA synthetase activity, to catalyze triglyceride production. These and related embodiments are detailed below.

[0191] Fatty Acid Biosynthesis. Fatty acids are a group of negatively charged, linear hydrocarbon chains of various length and various degrees of oxidation states. The negative charge is located at a carboxyl end group and is typically deprotonated at physiological pH values (pK ˜2-3).The length of the fatty acid ‘tail’ determines its water solubility (or rather insolubility) and amphipathic characteristics. Fatty acids are components of phospholipids and sphingolipids, which form part of biological membranes, as well as triglycerides, which are primarily used as energy storage molecules inside cells.

[0192] Fatty acids are formed from acetyl-CoA and malonyl-CoA precursors. Malonyl-CoA is a carboxylated form of acetyl-CoA, and contains a 3-carbon dicarboxylic acid, malonate, bound to Coenzyme A. Acetyl-CoA carboxylase catalyzes the 2-step reaction by which acetyl-CoA is carboxylated to form malonyl-CoA. In particular, malonate is formed from acetyl-CoA by the addition of CO₂ using the biotin cofactor of the enzyme acetyl-CoA carboxylase.

[0193] Fatty acid synthase (FAS) carries out the chain elongation steps of fatty acid biosynthesis. FAS is a large multienzyme complex. In mammals, FAS contains two subunits, each containing multiple enzyme activities. In bacteria and plants, individual proteins, which associate into a large complex, catalyze the individual steps of the synthesis scheme. For example, in bacteria and plants, the acyl carrier protein is a smaller, independent protein.

[0194] Fatty acid synthesis starts with acetyl-CoA, and the chain grows from the “tail end” so that carbon 1 and the alpha-carbon of the complete fatty acid are added last. The first reaction is the transfer of an acetyl group to a pantothenate group of acyl carrier protein (ACP), a region of the large mammalian fatty acid synthase (FAS) protein. In this reaction, acetyl CoA is added to a cysteine —SH group of the condensing enzyme (CE) domain: acetyl CoA+CE-cys-SH→acetyl-cys-CE+CoASH. Mechanistically, this is a two step process, in which the group is first transferred to the ACP (acyl carrier peptide), and then to the cysteine -SH group of the condensing enzyme domain.

[0195] In the second reaction, malonyl CoA is added to the ACP sulfhydryl group: malonyl CoA+ACP-SH→malonyl ACP+CoASH. This —SH group is part of a phosphopantethenic acid prosthetic group of the ACP.

[0196] In the third reaction, the acetyl group is transferred to the malonyl group with the release of carbon dioxide: malonyl ACP+acetyl-cys-CE→beta-ketobutyryl-ACP+CO₂.

[0197] In the fourth reaction, the keto group is reduced to a hydroxyl group by the beta-ketoacyl reductase activity: beta-ketobutyryl-ACP+NADPH+H+⁺→beta-hydroxybutyryl-ACP+NAD⁺.

[0198] In the fifth reaction, the beta-hydroxybutyryl-ACP is dehydrated to form a trans-monounsaturated fatty acyl group by the beta-hydroxyacyl dehydratase activity: beta-hydroxybutyryl-ACP→2-butenoyl-ACP+H₂O.

[0199] In the sixth reaction, the double bond is reduced by NADPH, yielding a saturated fatty acyl group two carbons longer than the initial one (an acetyl group was converted to a butyryl group in this case): 2-butenoyl-ACP+NADPH+H⁺→butyryl-ACP+NADP⁺. The butyryl group is then transferred from the ACP sulfhydryl group to the CE sulfhydryl: butyryl-ACP+CE-cys-SH→ACP-SH+butyryl-cys-CE. This step is catalyzed by the same transferase activity utilized previously for the original acetyl group. The butyryl group is now ready to condense with a new malonyl group (third reaction above) to repeat the process. When the fatty acyl group becomes 16 carbons long, a thioesterase activity hydrolyses it, forming free palmitate: palmitoyl-ACP+H₂O→palmitate+ACP-SH. Fatty acid molecules can undergo further modification, such as elongation and/or desaturation.

[0200] Modified photosynthetic microorganisms, e.g., Cyanobacteria, may comprise one or more exogenous polynucleotides encoding any of the above polypeptides or enzymes involved in fatty acid synthesis. In particular embodiments, the enzyme is an acetyl-CoA carboxylase or a variant or functional fragment thereof.

[0201] Wax Ester Synthesis. Wax esters are esters of a fatty acid and a long-chain alcohol. These neutral lipids are composed of aliphatic alcohols and acids, with both moieties usually long-chain (e.g., C₁₆ and C₁₈) or very-long-chain (C₂₀ and longer) carbon structures, though medium-chain-containing wax esters are included (e.g., C₁₀, C₁₂ and C₁₄). Wax esters have diverse biological functions in bacteria, insects, mammals, and terrestrial plants and are also important substrates for a variety of industrial applications. Various types of wax ester are widely used in the manufacture of fine chemicals such as cosmetics, candles, printing inks, lubricants, coating stuffs, and others.

[0202] In certain organisms, such as Acinetobacter, the pathway for wax ester synthesis of Acinetobacter spp. has been assumed to start from acyl coenzyme A (acyl-CoA), which is then reduced to the corresponding alcohol via acyl-CoA reductase and aldehyde reductase. In other organisms, for example, wax ester biosynthesis involves elongation of saturated C₁₆ and C₁₈ fatty acyl-CoAs to very-long-chain fatty acid wax precursors between 24 and 34 carbons in length, and their subsequent modification by either the alkane-forming (decarbonylation) or the alcohol-forming (acyl reduction) pathway (see Li et al., Plant Physiology 148:97-107, 2008).

[0203] In certain aspects, wax ester synthesis can occur via the acyl-ACP=>acyl aldehyde pathway. In this pathway, acyl-ACP reductase overexpression increases conversion of acyl-ACP into acyl aldehydes, alcohol dehydrogenase overexpression then increases conversion of acyl aldehydes into fatty alcohols, and DGAT overexpression cooperatively increases conversion of the fatty alcohols into their corresponding wax esters. Modified photosynthetic microorganisms, e.g., Cyanobacteria, may therefore comprise one or more exogenous polynucleotides encoding any of the above polypeptides or enzymes involved in wax ester synthesis.

[0204] Acyl Carrier Proteins. Embodiments of the present disclosure optionally include one or more exogenous (e.g., recombinantly introduced) or overexpressed ACP proteins. These proteins play crucial roles in fatty acid synthesis. Fatty acid synthesis in bacteria, including Cyanobacteria, is carried out by highly conserved enzymes of the type II fatty acid synthase system (FAS II; consisting of about 19 genes) in a sequential, regulated manner. Acyl carrier protein (ACP) plays a central role in this process by carrying all the intermediates as thioesters attached to the terminus of its 4′-phosphopantetheine prosthetic group (ACP-thioesters). Apo-ACP, the product of acp gene, is typically activated by a phosphopantetheinyl transferease (PPT) such as the acyl carrier protein synthase (AcpS) type found in E. coli or the Sfp (surfactin type) PTT as characterized in Bacillus subtilis. Cyanobacteria posses an Sfp-like PPT, which is understood to act in both primary and secondary metabolism. Embodiments of the present disclosure therefore include overexpression of PPTs such as AcpS and/or Sfp-type PPTs in combination with overexpression of cognate ACP encoding genes, such as ACP.

[0205] The ACP-thioesters are substrates for all of the enzymes of the FAS II system. The end product of fatty acid synthesis is a long acyl chain typically consisting of about 14-18 carbons attached to ACP by a thioester bond.

[0206] At least three enzymes of the FAS II system in other bacteria can be subject to feedback inhibition by acyl-ACPs: 1) the ACCase complex—a heterotetramer of the AccABCD genes that catalyzes the production of malonyl-coA, the first step in the pathway; 2) the product of the FabH gene (β-ketoacyl-ACP synthase III), which catalyzes the condensation of acetyl-CoA with malonyl-ACP; and 3) the product of the Fabl gene (enoyl-ACP reductase), which catalyzes the final elongation step in each round of elongation. Certain proteins such as acyl-ACP reductase are capable of increasing fatty acid production in photosynthetic bacteria such as Cyanobacteria, and it is believed that overexpression of ACP in combination with this protein and possibly other biosynthesis proteins will further increases fatty acid production in such strains.

[0207] An ACP can be derived from a variety of eukaryotic organisms, microorganisms (e.g., bacteria, fungi), or plants. In certain embodiments, an ACP polynucleotide sequence and its corresponding polypeptide sequence are derived from Cyanobacteria such as Synechococcus. In certain embodiments, ACPs can be derived from plants such as spinach. SEQ ID NOS:5-12 provide the nucleotide and polypeptide sequences of exemplary bacterial ACPs from Synechococcus and Acinetobacter, and SEQ ID NOS:13-14 provide the same for an exemplary plant ACP from Spinacia oleracea (spinach). SEQ ID NOS:5 and 6 derive from Synechococcus elongatus PCC7942, and SEQ ID NOS:7-12 derive from Acinetobacter sp. ADP1.

[0208] Examples of prokaryotic organisms having an ACP include certain actinomycetes, a group of Gram-positive bacteria with high G+C ratio, such as those from the representative genera Actinomyces, Arthrobacter, Corynebacterium, Frankia, Micrococcus, Mocrimonospora, Mycobacterium, Nocardia, Propionibacterium, Rhodococcus and Streptomyces. Particular examples of actinomycetes that have one or more genes encoding an ACP activity include, for example, Mycobacterium tuberculosis, M. avium, M. smegmatis, Micromonospora echinospora, Rhodococcus opacus, R. ruber, and Streptomyces lividans. Additional examples of prokaryotic organisms that encode one or more enzymes having an ACP activity include members of the genera Acinetobacter, such as A. calcoaceticus, A. baumanii, A. baylii, and members of the generua Alcanivorax. In certain embodiments, an ACP gene or enzyme is isolated from Acinetobacter baylii sp. ADP1, a gram-negative triglyceride forming prokaryote.

[0209] Acyl ACP Synthases (Aas). Acyl-ACP synthetases (Aas) catalyze the ATP-dependent acylation of the thiol of acyl carrier protein (ACP) with fatty acids, including those fatty acids having chain lengths from about C4 to C18. In Cyanobacteria, among other functions, Aas enzymes not only directly incorporate exogenous fatty acids from the culture medium into other lipids, but also play a role in the recycling of acyl chains from lipid membranes. Deletion of Aas in cyanobacteria can lead to secretion of free fatty acids into the culture medium. See, e.g., Kaczmarzyk and Fulda, Plant Physiology 152:1598-1610, 2010.

[0210] Certain embodiments may overexpress one or more Aas polypeptides described herein and known in the art. According to one non-limiting theory, overexpression of Aas in combination with overexpression of ACP leads to increased TAG production in DGAT-expressing strains, for example, by boosting acyl-ACP levels. Overexpression of Aas in optional combination with overexpression of ACP may likewise increase wax ester formation, for example, when combined with overexpression of one or more alcohol dehydrogenase(s) and wax ester synthase(s), such as a bi-functional DGAT. Certain embodiments therefore include modified photosynthetic microorganisms comprising overexpressed Aas polypeptide(s), optionally in combination with overexpressed ACP polypeptide(s), especially when combined with overexpression of alcohol dehydrogenase, acyl-ACP reductase (e.g., orf1594), and wax ester synthase (e.g., aDGAT).

[0211] Examples of bacterial Aas enzymes include those derived from E. coli, Acinetobacter, and Vibrio sp. such as V. harveyi (see, e.g., Shanklin, Protein Expression and Purification. 18:355-360, 2000; Jiang et al., Biochemistry. 45:10008-10019, 2006). SEQ ID NOS:43 and 44, respectively, provide the nucleotide and polypeptide sequences of an exemplary Aas from Synechococcus elongatus PCC 7942 (0918).

[0212] In certain embodiments, the Aas is derived from the same organism as the overexpressed ACP, DGAT, and /or the TES, if any one of these polypeptides is employed in combination with an Aas. Accordingly, certain embodiments include Aas sequences from any of the organisms described herein for deriving a DGAT or TES, including, for example, various animals (e.g., mammals, fruit flies, nematodes), plants, parasites, and fungi (e.g., yeast such as S. cerevisiae and Schizosaccharomyces pombe). Examples of prokaryotic organisms include certain actinomycetes, a group of Gram-positive bacteria with high G+C ratio, such as those from the representative genera Actinomyces, Arthrobacter, Corynebacterium, Frankia, Micrococcus, Mocrimonospora, Mycobacterium, Nocardia, Propionibacterium, Rhodococcus and Streptomyces. Particular examples of actinomycetes that have one or more genes encoding an Aas activity include, for example, Mycobacterium tuberculosis, M. avium, M. smegmatis, Micromonospora echinospora, Rhodococcus opacus, R. ruber, and Streptomyces lividans. Additional examples of prokaryotic organisms that encode one or more enzymes having an Aas activity include members of the genera Acinetobacter, such as A. calcoaceticus, A. baumanii, A. baylii, and members of the generua Alcanivorax. In certain embodiments, an Aas gene or enzyme is isolated from Acinetobacter baylii sp. ADP1, a gram-negative triglyceride forming prokaryote.

[0213] According to one non-limiting theory, an endogenous aldehyde dehydrogenase may be acting on the excess acyl-aldehydes generated by overexpressed orf1594 and converting them to free fatty acids. The normal role of such a dehydrogenase might involve removing or otherwise dealing with damaged lipids. In this scenario, it is then likely that the Aas gene product recycles these free fatty acids by ligating them to ACP. Accordingly, reducing or eliminating expression of the Aas gene product might ultimately increase production of fatty acids, by reducing or preventing their transfer to ACP. Hence, certain aspects include mutations (e.g., genomic) such as point mutations or insertions that reduce or eliminate the enzymatic activity of one or more endogenous acyl-ACP synthetases (or synthases). Also included are full or partial deletions of an endogenous gene encoding an Aas protein.

[0214] Acyl-ACP Reductases. Acyl-ACP reductases (or acyl-ACP dehydrogenases) are members of the reductase or short-chain dehydrogenase family, and are key enzymes of the type II fatty acid synthesis (FAS) system. Among other potential catalytic activities, an “acyl-ACP reductase” or “acyl-ACP dehydrogenase” as used herein is capable of catalyzing the conversion (reduction) of acyl-ACP to an acyl aldehyde (see Schirmer et al., supra) and the concomitant oxidation of NAD(P)H to NADP⁺. In some embodiments, the acyl-ACP reductase preferentially interacts with acyl-ACP, and does not interact significantly with acyl-CoA, i.e., it does not significantly catalyze the conversion of acyl-CoA to acyl aldehyde.

[0215] Acyl-ACP reductases can be derived from a variety of plants and bacteria, included photosynthetic microorganisms such as Cyanobacteria. One exemplary acyl-ACP reductase is encoded by orf1594 of Synechococcus elongatus PCC7942 (see SEQ ID NOs:1 and 2 for the polynucleotide and polypeptide sequences, respectively). Another exemplary acyl-ACP reductase is encoded by orfsll0209 of Synechocystis sp. PCC6803 (SEQ ID NOs:3 and 4 for the polynucleotide and polypeptide sequences, respectively).

[0216] Alcohol Dehydrogenases. Embodiments of the present disclosure optionally include one or more alcohol dehydrogenase polypeptides. Examples of alcohol dehydrogenases include those capable of using acyl or fatty aldehydes (e.g., one or more of nonyl-aldehyde, C₁₂, C₁₄, C₁₆, C₁₈, C₂₀ fatty aldehyde) as a substrate, and converting them into fatty alcohols. Specific examples include long-chain alcohol dehydrogenases, capable of using long-chain aldehydes (e.g., C₁₆, C₁₈, C₂₀) as substrates. In certain embodiments, the alcohol dehydrogenase is naturally-occurring or endogenous to the modified microorganism, and is sufficient to convert increased acyl aldehydes (produced by acyl-ACP reductase) into fatty alcohols, and thereby contribute to increased wax ester production and overall satisfactory growth characteristics. In certain embodiments, the alcohol dehydrogenase is derived from a microorganism that differs from the one being modified.

[0217] In these and related embodiments, expression or overexpression of an alcohol dehydrogenase may increase shunting of acyl aldehydes towards production of fatty alcohols, and away from production of other products such as alkanes, fatty acids, or triglycerides. When combined with one or more wax ester synthases, such as DGAT or other enzyme having wax ester synthase activity (e.g., the ability to convert fatty alcohols into wax esters), alcohol dehydrogenases may contribute to production of wax esters. They may also reduce accumulation of potentially toxic acyl aldehydes, and thereby improve growth characteristics of a modified microorganism.

[0218] Non-limiting examples of alcohol dehydrogenases include those encoded by slr1192 of Synechocystis sp. PCC6803 (SEQ ID NOS:104-105) and ACIAD3612 of Acinetobacter baylyi (SEQ ID NOS:106-107). Also included are homologs or paralogs thereof, functional equivalents thereof, and fragments or variants thereofs. Functional equivalents can include alcohol dehydrogenases with the ability to efficiently convert acyl aldehydes (e.g., C₆, C₈, C₁₀, C₁₂, C₁₄, C₁₆, C₁₈, C₂₀ aldehydes) into fatty alcohols. Specific examples of functional equivalents include long-chain alcohol dehydrogenases, having the ability to utilize long-chain aldehydes (e.g., C₁₆, C₁₈, C₂₀) as substrates.

[0219] In particular embodiments, the alcohol dehydrogenase has the amino acid sequence of SEQ ID NO:105 (encoded by the polynucleotide sequence of SEQ ID NO:104), or an active fragment or variant of this sequence. In some embodiments, the alcohol dehydrogenase has the amino acid sequence of SEQ ID NO:107 (encoded by the polynucleotide sequence of SEQ ID NO:106), or an active fragment or variant of this sequence.

[0220] Aldehyde Dehydrogenases. Embodiments of the present disclosure optionally include one or more overexpressed or introduced aldehyde dehydrogenases. Examples of aldehyde dehydrogenases include enzymes capable of using acyl aldehydes (e.g., nonyl-aldehyde, C16 fatty aldehyde) as a substrate, and converting them into fatty acids. In certain embodiments, the aldehyde dehydrogenase is naturally-occurring or endogenous to the modified microorganism, and is sufficient to convert increased acyl aldehydes (produced by acyl-ACP reductase) into fatty acids, and thereby contribute to increased fatty acid production and overall satisfactory growth characteristics.

[0221] In certain embodiments, the aldehyde dehydrogenase can be overexpressed, for example, by recombinantly introducing a polynucleotide that encodes the enzyme, increasing expression of an endogenous enzyme, or both. An aldehyde dehydrogenase can be overexpressed in a strain that already expresses a naturally-occurring or endogenous enzyme, to further increase fatty acid production of an acyl-ACP reductase over-expressing strain and/or improve its growth characteristics, relative, for example, to an acyl-ACP reductase-overexpressing strain that only expresses endogenous aldehyde dehydrogenase. An aldehyde dehydrogenase can also be expressed or overexpressed in a strain that does not have a naturally occurring aldehyde dehydrogenase of that type, e.g., it does not naturally express an enzyme that is capable of efficiently converting acyl aldehydes such as nonyl-aldehyde into fatty acids.

[0222] In these and related embodiments, expression or overexpression of an aldehyde dehydrogenase may increase shunting of acyl aldehydes towards production of fatty acids, and away from production of other products such as alkanes. It may also reduce accumulation of potentially toxic acyl aldehydes, and thereby improve growth characteristics of a modified microorganism.

[0223] One exemplary aldehyde dehydrogenase is encoded by orf0489 of Synechococcus elongatus PCC7942. Also included are homologs or paralogs thereof, functional equivalents thereof, and fragments or variants thereof. Functional equivalents can include aldehyde dehydrogenases with the ability to efficiently convert acyl aldehydes (e.g., nonyl-aldehyde) into fatty acids. In certain embodiments, the aldehyde dehydrogenase has the amino acid sequence of SEQ ID NO:103 (encoded by the polynucleotide sequence of SEQ ID NO:102), or an active fragment or variant of this sequence.

[0224] Particular embodiments include photosynthetic microorganisms having reduced expression and/or activity of one or more aldehyde dehydrogenases, for instance, in the production of wax esters. Included are mutations (e.g., genomic) that reduce or eliminate the enzymatic activity of one or more endogenous aldehyde dehydrogenases, such as point mutations, insertions, or full or partial deletion mutations. Certain embodiments include a modified Synechococcus elongatus PCC7942 having a full or partial deletion of orf0489.

[0225] Aldehyde Decarbonylases. Certain embodiments include photosynthetic microorganisms having reduced expression and/or activity of one or more aldehyde decarbonylases. As used herein, an “aldehyde decarbonylase” is capable of catalyzing the conversion of an acyl aldehyde (or fatty aldehyde) to an alkane or alkene. Included are members of the ferritin-like or ribonucleotide reductase-like family of nonheme diiron enzymes (see, e.g., Stubbe et al., Trends Biochem Sci. 23:438-43, 1998).

[0226] According to one non-limiting theory, because the aldehyde decarbonylase encoded by PCC7942_orf1593 (from Synechococcus) or PCC6803_orfsll0208 (from Synechostis sp. PCC6803) utilizes acyl aldehyde as a substrate for alkane or alkene production, reducing expression of this protein may further increase yields of free fatty acids by shunting acyl aldehydes (produced by acyl-ACP reductase) away from an alkane-producing pathway, and towards a fatty acid-producing pathway. PCC7942_orf1593 and PCC6803_orfsll0208 orthologs can be found, for example, in N. punctiforme PCC73102, Thermosynechococcus elongatus BP-1, Synechococcus sp. Ja-3-3AB, P. marinus MIT9313, P. marinus NATL2A, and Synechococcus sp. RS 9117, the latter having at least two paralogs (RS 9117-1 and -2).

[0227] Particular embodiments include mutations (e.g., genomic) that reduce or eliminate the enzymatic activity of one or more endogenous aldehyde decarbonylases, for instance, in the production of fatty acids or wax esters, optionally in combination with reduced expression of one or more endogenous aldehyde dehydrogenases. Also included are point mutations, insertions, and full or partial deletions of an endogenous gene encoding an aldehyde decarbonylase. Certain embodiments include a modified Synechococcus elongatus PCC7942 having a full or partial deletion of orf1593.

[0228] Thioesterases. Certain embodiment include one or more exogenous or overexpressed thioesterase enzymes, optionally in combination with at least one of an introduced ACP enzyme, an introduced Aas enzyme, or both. For instance, one embodiment relates to the use an introduced ACP and/or Aas to increase the growth and/or fatty acid production of a free fatty acid producing TES strain, such as a TesA strain or a FatB strain (i.e., a strain having an introduced TesA or FatB). Thioesterases, as referred to herein, exhibit esterase activity (splitting of an ester into acid and alcohol, in the presence of water) specifically at a thiol group. Fatty acids are often attached to cofactor molecules, such as coenzyme A (CoA) and acyl carrier protein (ACP), by thioester linkages during the process of de novo fatty acid synthesis. Certain embodiments employ thioesterases having acyl-ACP thioesterase activity, acyl-CoA thioesterase activity, or both activities. Examples of thioesterases having both activities (i.e., acyl-ACP/acyl-CoA thioesterases) include TesA and related embodiments. In certain embodiments, a selected thioesterase has acyl-ACP thioesterase activity but not acyl-CoA thioesterase activity. Examples of thioesterases having only acyl-ACP thioesterase activity include the FatB thioesterases and related embodiments.

[0229] Certain thioesterases have both thioesterase activity and lysophospholipase activity. Specific examples of thioesterases include TesA, TesB, and related embodiments. Certain embodiments may employ periplasmically-localized or cytoplasmically-localized enzymes that thioesterase activity, such as E. coli TesA or E. coli TesB. For instance, wild type TesA, being localized to the periplasm, is normally used to hydrolyze thioester linkages of fatty acid-ACP (acyl-ACP) or fatty acid-CoA (acyl-CoA) compounds scavenged from the environment. A mutant thioesterase, PldC (referred to interchangeably as PldC/*TesA or *TesA), is not exported to the periplasm due to deletion of an N-terminal amino acid sequence required for proper transport of TesA from the cytoplasm to the periplasm. This deletion results in a cytoplasmic-localized PldC(*TesA) protein that has access to endogenous acyl-ACP and acyl-CoA intermediates. Other mutations or deletions in the N-terminal region of TesA can be used to achieve the same result, i.e., a cytoplasmic TesA.

[0230] Overexpressed PldC(*TesA) results in hydrolysis of acyl groups from endogenous acyl-ACP and acyl-CoA molecules. Cells expressing PldC(*TesA) must channel additional cellular carbon and energy to maintain production of acyl-ACP and acyl-coA molecules, which are required for membrane lipid synthesis. Thus, PldC(*TesA) expression results in a net increase in total cellular lipid content. For instance, PldC(*TesA) expressed alone in Synechococcus doubles the total lipid content from 10% of biomass to 20% of biomass, a result that can be further increased by combining *TesA or related molecules with an introduced ACP and/or an introduced Aas. Hence, certain embodiments employ an exogenous or overexpressed cytoplasmic TesA (such as *TesA) in combination with an exogenous or overexpressed ACP, an exogenous or overexpressed Aas, or both.

[0231] In certain embodiments, a thioesterase (TES) is an acyl-ACP thioesterase and/or an acyl-CoA thioesterase. In particular embodiments, the TES is a TesA or TesB polypeptide from E. coli, or a cytoplasmic TesA variant (*TesA) variant having the sequence set forth in SEQ ID NO:121, or a fragment or variant thereof.

[0232] Certain thioesterases have thioesterase activity only, i.e., they have little or no lysophospholipase activity. Examples of these thioesterases include enzymes of the FatB family. FatB encoded enzymes typically hydrolyze saturated C14-C18 ACPs, preferentially 16:0 ACP, but they can also hydrolyze 18:1 ACP. The production of medium chain (C8-C12) fatty acids in plants or seeds such as those of Cuphea spp. often results of FatB enzymes that have chain length specificities for medium chain fatty acyl-ACPs. These medium chain FatB thioesterases are present in many species with medium-chain fatty acids in their oil, including, for example, California bay laurel, coconut, and elm, among others. Hence, FatB sequences may be derived from these and other organisms. Particular examples include plant FatB acyl-ACP thioesterases such as C8, C12, C14, and C16 FatB thioesterases. Hence, in certain embodiments, the TES is a FatB polypeptide, such as a C8, C12, C14, C16, or C18 FatB.

[0233] Specific examples of FatB thioesterases include the Cuphea hookeriana C8/C10 FatB thioesterase, the Umbellularia califomica C12 FatB1 thioesterase, the Cinnamomum camphora C14 FatB1 thioesterase, and the Cuphea hookeriana C16 FatB1 thioesterase. In specific embodiments, the thioesterase is a Cuphea hookeriana C8/C10 FatB, comprising the amino acid sequence of SEQ ID NO:108 (full-length protein) or SEQ ID NO:109 (mature protein without signal sequence). In particular embodiments, the thioesterase is a Umbellularia califomica C12 FatB1, comprising the amino acid sequence of SEQ ID NO:110 (full-length protein) or SEQ ID NO:111 (mature protein without signal sequence). In certain embodiments, the thioesterase is a Cinnamomum camphora C14 FatB1, comprising the amino acid sequence of SEQ ID NO:112 (full-length protein) or SEQ ID NO:113 (mature protein without signal sequence). In particular embodiments, the thioesterase is a Cuphea hookeriana C16 FatB1, comprising the amino acid sequence of SEQ ID NO:114 (full-length protein) or SEQ ID NO:115 (mature protein without signal sequence).

[0234] Acetyl Coenzyme A carboxylases (ACCase). Embodiments of the present disclosure optionally include one or more exogenous (e.g., recombinantly introduced) or overexpressed ACCase proteins. As used herein, an “acetyl CoA carboxylase” gene includes any polynucleotide sequence encoding amino acids, such as protein, polypeptide or peptide, obtainable from any cell source, which demonstrates the ability to catalyze the carboxylation of acetyl-CoA to produce malonyl-CoA under enzyme reactive conditions, and further includes any naturally-occurring or non-naturally occurring variants of an acetyl-CoA carboxylase sequence having such ability.

[0235] Acetyl-CoA carboxylase (ACCase) is a biotin-dependent enzyme that catalyses the irreversible carboxylation of acetyl-CoA to produce malonyl-CoA through its two catalytic activities, biotin carboxylase (BC) and carboxyltransferase (CT). The biotin carboxylase (BC) domain catalyzes the first step of the reaction: the carboxylation of the biotin prosthetic group that is covalently linked to the biotin carboxyl carrier protein (BCCP) domain. In the second step of the reaction, the carboxyltransferase (CT) domain catalyzes the transfer of the carboxyl group from (carboxy) biotin to acetyl-CoA. Formation of malonyl-CoA by acetyl-CoA carboxylase (ACCase) represents the commitment step for fatty acid synthesis, because malonyl-CoA has no metabolic role other than serving as a precursor to fatty acids. Because of this reason, acetyl-CoA carboxylase represents a pivotal enzyme in the synthesis of fatty acids.

[0236] In most prokaryotes, ACCase is a multi-subunit enzyme, whereas in most eukaryotes it is a large, multi-domain enzyme. In yeast, the crystal structure of the CT domain of yeast ACCase has been determined at 2.7 A resolution (Zhang et al., Science, 299:2064-2067 (2003). This structure contains two domains, which share the same backbone fold. This fold belongs to the crotonase/ClpP family of proteins, with a b-b-a superhelix. The CT domain contains many insertions on its surface, which are important for the dimerization of ACCase. The active site of the enzyme is located at the dimer interface.

[0237] Although Cyanobacteria, such as Synechococcus, express a native ACCase enzyme, these bacteria typically do not produce or accumulate significant amounts of fatty acids. For example, Synechococcus in the wild accumulates fatty acids in the form of lipid membranes to a total of about 4% by dry weight.

[0238] Given the role of ACCase in the commitment step of fatty acid biosynthesis, embodiments of the present disclosure include methods of increasing the production of fatty acid biosynthesis, and, thus, lipid production, in Cyanobacteria by introducing one or more polynucleotides that encode an ACCase enzyme that is exogenous to the Cyanobacterium's native genome. Embodiments of the present disclosure also include a modified Cyanobacterium, and compositions comprising the Cyanobacterium, comprising one or more polynucleotides that encode an ACCase enzyme that is exogenous to the Cyanobacterium's native genome.

[0239] A polynucleotide encoding an ACCase enzyme may be isolated or obtained from any organism, such as any prokaryotic or eukaryotic organism that contains an endogenous ACCase gene. Examples of eukaryotic organisms having an ACCase gene are well-known in the art, and include various animals (e.g., mammals, fruit flies, nematodes), plants, parasites, and fungi (e.g., yeast such as S. cerevisiae and Schizosaccharomyces pombe). In certain embodiments, the ACCase encoding polynucleotide sequences are obtained from Synechococcus sp. PCC7002.

[0240] Examples of prokaryotic organisms that may be utilized to obtain a polynucleotide encoding an enzyme having ACCase activity include, but are not limited to, Escherichia coli, Legionella pneumophila, Listeria monocytogenes, Streptococcus pneumoniae, Bacillus subtilis, Ruminococcus obeum ATCC 29174, marine gamma proteobacterium HTCC2080, Roseovarius sp. HTCC2601, Oceanicola granulosus HTCC2516, Bacteroides caccae ATCC 43185, Vibrio alginolyticus 12G01, Pseudoalteromonas tunicata D2, Marinobacter sp. ELB17, marine gamma proteobacterium HTCC2143, Roseobacter sp. SK209-2-6, Oceanicola batsensis HTCC2597, Rhizobium leguminosarum bv. trifolii WSM1325, Nitrobacter sp. Nb-311A, Chloroflexus aggregans DSM 9485, Chlorobaculum parvum, Chloroherpeton thalassium, Acinetobacter baumannii, Geobacillus, and Stenotrophomonas maltophilia, among others.

[0241] Particular exemplary acetyl-CoA carboxylases (ACCase) comprise or consist of a polypeptide sequence set forth in any of SEQ ID NOs:55, 45, 46, 47, 48 or 49, or a fragment or variant thereof. SEQ ID NO:55 is the sequence of Saccharomyces cerevisiae acetyl-CoA carboxylase (yAcc1); SEQ ID NO:45 is Synechococcus sp. PCC 7002 AccA; SEQ ID NO:46 is Synechococcus sp. PCC 7002 AccB; SEQ ID NO:47 is Synechococcus sp. PCC 7002 AccC; and SEQ ID NO:48 is Synechococcus sp. PCC 7002 AccD; and SEQ ID NO:49 is a Triticum aestivum ACCase. In certain embodiments, the introduced ACCase is not native to the genome of the modified photosynthetic microorganism.

[0242] Phosphatidic Acid Phosphatases (PAP). As used herein, a “phosphatidate phosphatase” or “phosphatidic acid phosphatase” gene includes any polynucleotide sequence encoding amino acids, such as protein, polypeptide or peptide, obtainable from any cell source, which demonstrates the ability to catalyze the dephosphorylation of phosphatidate (PtdOH) under enzyme reactive conditions, yielding diacylglycerol (DAG) and inorganic phosphate, and further includes any naturally-occurring or non-naturally occurring variants of a phosphatidate phosphatase sequence having such ability.

[0243] Phosphatidate phosphatases (PAP, 3-sn-phosphatidate phosphohydrolase) catalyze the dephosphorylation of phosphatidate (PtdOH), yielding diacylglycerol (DAG) and inorganic phosphate. This enzyme belongs to the family of hydrolases, specifically those acting on phosphoric monoester bonds. The systematic name of this enzyme class is 3-sn-phosphatidate phosphohydrolase. Other names in common use include phosphatic acid phosphatase, acid phosphatidyl phosphatase, and phosphatic acid phosphohydrolase. This enzyme participates in at least 4 metabolic pathways: glycerolipid metabolism, glycerophospholipid metabolism, ether lipid metabolism, and sphingolipid metabolism.

[0244] PAP enzymes have roles in both the synthesis of phospholipids and triacylglycerol through its product diacylglycerol, as well as the generation or degradation of lipid-signaling molecules in eukaryotic cells. PAP enzymes are typically classified as either Mg²⁺-dependent (referred to as PAP1 enzymes) or Mg²⁺-independent (PAP2 or lipid phosphate phosphatase (LPP) enzymes) with respect to their cofactor requirement for catalytic activity. In both yeast and mammalian systems, PAP2 enzymes are known to be involved in lipid signaling. By contrast, PAP1 enzymes, such as those found in Saccharomyces cerevisiae, play a role in de novo lipid synthesis (Han, et al. J Biol Chem. 281:9210-9218, 2006), thereby revealing that the two types of PAP are responsible for different physiological functions.

[0245] In both yeast and higher eukaryotic cells, the PAP reaction is the committed step in the synthesis of the storage lipid triacylglycerol (TAG), which is formed from PtdOH through the intermediate DAG. The reaction product DAG is also used in the synthesis of the membrane phospholipids phosphatidylcholine (PtdCho) and phosphatidylethanolamine. The substrate PtdOH is used for the synthesis of all membrane phospholipids (and the derivative inositol-containing sphingolipids) through the intermediate CDP-DAG. Thus, regulation of PAP activity might govern whether cells make storage lipids and phospholipids through DAG or phospholipids through CDP-DAG. In addition, PAP is involved in the transcriptional regulation of phospholipid synthesis.

[0246] PAP1 enzymes have been purified and characterized from the membrane and cytosolic fractions of yeast, including a gene (Pah1, formerly known as Smp2) been identified to encode a PAP1 enzyme in S. cerevisiae. The Pah1-encoded PAP1 enzyme is found in the cytosolic and membrane fractions of the cell, and its association with the membrane is peripheral in nature. As expected from the multiple forms of PAP1 that have been purified from yeast, pah1Δ mutants still contain PAP1 activity, indicating the presence of an additional gene or genes encoding enzymes having PAP1 activity.

[0247] Analysis of mutants lacking the Pah1-encoded PAP1 has provided evidence that this enzyme generates the DAG used for lipid synthesis. Cells containing the pah1Δ mutation accumulate PtdOH and have reduced amounts of DAG and its acylated derivative TAG. Phospholipid synthesis predominates over the synthesis of TAG in exponentially growing yeast, whereas TAG synthesis predominates over the synthesis of phospholipids in the stationary phase of growth. The effects of the pah1Δ mutation on TAG content are most evident in the stationary phase. For example, stationary phase cells devoid of the Pah1 gene show a reduction of >90% in TAG content. Likewise, the pah1Δ mutation shows the most marked effects on phospholipid composition (e.g. the consequent reduction in PtdCho content) in the exponential phase of growth. The importance of the Pah1-encoded PAP1 enzyme to cell physiology is further emphasized because of its role in the transcriptional regulation of phospholipid synthesis.

[0248] The requirement of Mg²⁺ ions as a cofactor for PAP enzymes is correlated with the catalytic motifs that govern the phosphatase reactions of these enzymes. For example, the Pah1-encoded PAP1 enzyme has a DxDxT (SEQ ID NO:198) catalytic motif within a haloacid dehalogenase (HAD)-like domain (“x” is any amino acid). This motif is found in a superfamily of Mg²⁺-dependent phosphatase enzymes, and its first aspartate residue is responsible for binding the phosphate moiety in the phosphatase reaction. By contrast, the DPP1-and LPP1-encoded PAP2 enzymes contain a three-domain lipid phosphatase motif that is localized to the hydrophilic surface of the membrane. This catalytic motif, which comprises the consensus sequences KxxxxxxRP (domain 1) (SEQ ID NO:116), PSGH (domain 2) (SEQ ID NO:117), and SRxxxxxHxxxD (domain 3) (SEQ ID NO:118), is shared by a superfamily of lipid phosphatases that do not require Mg²⁺ ions for activity. The conserved arginine residue in domain 1 and the conserved histidine residues in domains 2 and 3 may be essential for the catalytic activity of PAP2 enzymes. Accordingly, a phosphatidate phosphatase polypeptide may comprise one or more of the above-described catalytic motifs.

[0249] A polypeptide having a phosphatidate phosphatase enzymatic activity may be obtained from any organism having a suitable, endogenous phosphatidate phosphatase gene. Examples of organisms that may be used to obtain a phosphatidate phosphatase encoding polynucleotide sequence include, but are not limited to, Homo sapiens, Mus musculus, Rattus norvegicus, Bos taurus, Drosophila melanogaster, Arabidopsis thaliana, Magnaporthe grisea, Saccharomyces cerevisiae, Schizosaccharomyces pombe, Cryptococcus neoformans, and Bacillus pumilus, among others. Specific examples of PAP enzymes include Pah1 from S. cerevisiae, PgpB from E. coli, and PAP from PCC6803.

[0250] In certain embodiments, a phosphatidate phosphatase polypeptide comprises or consists of a polypeptide sequence set forth in SEQ ID NO:131, or a fragment or variant thereof. SEQ ID NO:131 is the sequence of Saccharomyces cerevisiae phosphatidate phosphatase (yPah1). In certain embodiments, the polypeptide sequence of the PAP is encoded by the E. coli PgpB gene, and/or the PAP gene from Synechocystis sp. PCC6803.

[0251] Triacylglycerol (TAG) Hydrolases. Certain embodiments relate to the use of exogenous or overexpressed TAG hydrolases (or TAG lipases) to increase production of TAGs in a TAG-producing strain. For instance, certain embodiments may utilize a TAG hydrolase in combination with a DGAT, and optionally a TES. These embodiments may then further utilize an ACP, an Aas, or both, any of the lipid biosynthesis proteins described herein, and/or any of the modifications to glycogen production and storage described herein. Hence, as noted above, TAG hydrolases may be used in TAG-producing strains (e.g., DGAT-expressing strains) with or without an ACP or Aas.

[0252] TAG hydrolases are carboxylesterases that are typically specific for insoluble long chain fatty acid TAGs. Carboxylesterases catalyze the chemical reaction:

carboxylic ester+H₂O [symbol] alcohol+carboxylate

[0253] Thus, the two substrates of this enzyme are carboxylic ester and H₂O, whereas its two products are alcohol and carboxylate. According to one non-limiting theory, it is understood that TAG hydrolase expression (or overexpression) in a TAG producing strain (e.g., DGAT/ACP, DGAT/Aas, DGAT/ACP/Aas) releases acyl chains to not only increase accumulation of free fatty acids (FFA), but also increase the amount of free 1, 2 diacylglycerol (DAG). This free DAG then serves as a substrate for DGAT, and thereby allows increased TAG production, especially in the presence of over-expressed ACP, Aas, or both. Accordingly, certain embodiments employing a TAG hydrolase produce increased amounts of TAG, relative, for example, to a DGAT only-expressing microorganism. In certain embodiments, the TAG hydrolase is specific for TAG and not DAG, i.e., it preferentially acts on TAG relative to DAG.

[0254] Non-limiting examples of TAG hydrolases include SDP1 (SUGAR-DEPENDENT1) triacylglycerol lipase from Arabidopsis thaliana (SEQ ID NO:170), ACIAD1335 from Acinetobacter sp. ADP1 (SEQ ID NO:171), TG14P from S. cerevisiae (SEQ ID NO:172), and RHA1_ro04722 (YP_704665) TAG lipase from Rhodococcus (SEQ ID NO:173). Additional putative lipases/esterases from Rhodococcus include RHA1_ro01602 lipase/esterase (see SEQ ID NOs:156 and 174 for polynucleotide and polypeptide sequence, respectively), and RHA1_ro06856 lipase/esterase (see SEQ ID NOs:119 and 120 for polynucleotide and polypeptide sequence, respectively).

[0255] Fatty Acyl-CoA Synthetases. Certain embodiments relate to the use of overexpressed fatty acyl-CoA synthetases to increase activation of fatty acids, and thereby increase production of TAGs in a TAG-producing strain (e.g., a DGAT-expressing strain). For instance, certain embodiments may utilize an acyl-ACP reductase in combination with a fatty acyl-CoA synthetase and a DGAT. These embodiments may then further utilize an ACP, an ACCase, or both, and/or any of the modifications to glycogen production and storage or glycogen breakdown described herein.

[0256] Fatty acyl-CoA synthetases activate fatty acids for metabolism by catalyzing the formation of fatty acyl-CoA thioesters. Fatty acyl-CoA thioesters can then serve not only as substrates for beta-oxidation, at least in bacteria capable of growing on fatty acids as a sole source of carbon (e.g., E. coli, Salmonella), but also as acyl donors in phospholipid biosynthesis. Many fatty acyl-CoA synthetases are characterized by two highly conserved sequence elements, an ATP/AMP binding motif, which is common to enzymes that form an adenylated intermediate, and a fatty acid binding motif.

[0257] According to one non-limiting theory, certain embodiments may employ fatty acyl-CoA synthetases to increase activation of free fatty acids, which can then be incorporated into TAGs, mainly by the DGAT-expressing (and thus TAG-producing) photosynthetic microorganisms described herein. Hence, fatty acyl-CoA synthetases can be used in any of the embodiments described herein, such as those that produce increased levels of free fatty acids, where it is desirable to turn free fatty acids into TAGs. As noted above, these free fatty acids can then be activated by fatty acyl-CoA synthetases to generate acyl-CoA thioesters, which can then serve as substrates by DGAT to produce increased levels of TAGs.

[0258] One exemplary fatty acyl-CoA synthetase includes the FadD gene from E. coli (SEQ ID NOS:16 and 17 for nucleotide and polypeptide sequence, respectively), which encodes a fatty acyl-CoA synthetase having substrate specificity for medium and long chain fatty acids. Other exemplary fatty acyl-CoA synthetases include those derived from S. cerevisiae; Faa1p can use C12-C16 acyl-chains in vitro (see SEQ ID NOS:18 and 19 for nucleotide and polypeptide sequence, respectively), Faa2p shows a less restricted specificity ranging from C7-C17 (see SEQ ID NOS:20 and 21 for nucleotide and polypeptide sequence, respectively), and Faa3p, together with that of DGAT1, enhances lipid accumulation in the presence of exogenous fatty acids in S. cerevisiae (see SEQ ID NO:22 and 23 for nucleotide and polypeptide sequence, respectively). SEQ ID NO:22 is codon-optimized for expression in S. elongatus PCC7942.

[0259] Lipases/Phospholipases. In various embodiments, modified photosynthetic microorganisms, ag., Cyanobacteria, of the present disclosure further comprise one or more exogenous or introduced nucleic acids that encode a polypeptide having a lipase or phospholipase activity, or a fragment or variant thereof. Lipases, including phospholipases, lysophospholipases, thioesterases, and enzymes having one, two, or all three of these activities, typically catalyze the hydrolysis of ester chemical bonds in lipid substrates. Without wishing to be bound by any one theory, in certain exemplary embodiments the expression of one or more phospholipases can generate fatty acids from membrane lipids, which may then be used by the ACP and/or Aas to make acyl-ACPs. These acyl-ACPs, for example, can then feed into the triglyceride synthesis pathways, thereby increasing triglyceride (TAG) production.

[0260] A phospholipase is an enzyme that hydrolyzes phospholipids into fatty acids and other lipophilic substances. There are four major classes, termed A, B, C and D distinguished by what type of reaction they catalyze. Phospholipase A1 cleaves the SN-1 acyl chain, while Phospholipase A2 cleaves the SN-2 acyl chain, releasing arachidonic acid. Phospholipase B cleaves both SN-1 and SN-2 acyl chains, and is also known as a lysophospholipase. Phospholipase C cleaves before the phosphate, releasing diacylglycerol and a phosphate-containing head group. Phospholipases C play a central role in signal transduction, releasing the second messenger, inositol triphosphate. Phospholipase D cleaves after the phosphate, releasing phosphatidic acid and an alcohol. Types C and D are considered phosphodiesterases. In various embodiments, one or more phospholipase from any one of these classes may be used, alone or in any combination.

[0261] As noted above, phospholipases (PLA1,2) act on phospholipids of different kinds including phosphatidyl glycerol, the major phospholipid in Cyanobacteria, by cleaving the acyl chains off the snl or sn2 positions (carbon 1 or 2 on the glycerol backbone); some are selective for sn1 or sn2, others act on both. Lysophospholipases act on lysophospholipids, which can be the product of phospholipases or on lysophosphatidic acid, a normal intermediate of the de novo phosphatidic acid synthesis pathway, e.g., 1-acyl-DAG-3-phosphate.

[0262] Merely by way of non-limiting theory, it is understood that in certain embodiments, phospholipases and/or lysophospholipases can cleave off acyl chains from phospholipids or lysophospholipids and thus deregulate the normal recycling of the lipid membranes, including both cell membrane and thylakoid membranes, which then leads to accumulation of free fatty acids (FFAs). In certain embodiments (e.g., TesA strains), these FFAs may accumulate extracellularly. In other embodiments (e.g., ACP and/or Aas over-expressing microorganisms), FFAs can be converted into acyl-ACPs by acyl ACP synthase (Aas) in a strain that also over-expresses ACP. In certain embodiments (e.g., DGAT-containing microorganisms), these acyl-ACPs can then serve as substrates for DGAT to make TAGs.

[0263] In other embodiments, phospholipases can be over-expressed to generate lyshophospholipids and acyl chains. The lysophospholipids can then serve as substrates for a lysophospholipase, which cleaves off the remaining acyl chain. In some embodiments, these acyl chains can either accumulate as FFAs, or in other embodiments may serve as substrates of Acyl ACP synthase (Aas) to generate acyl-ACPs, which can then be used by DGAT to make TAGs.

[0264] Particular examples of phospholipase C enzymes include those derived from eukaryotes such as mammals and parasites, in addition to those derived from bacteria. Examples include phosphoinositide phospholipase C (EC 3.1.4.11), the main form found in eukaryotes, especially mammals, the zinc-dependent phospholipase C family of bacterial enzymes (EC 3.1.4.3) that includes alpha toxins, phosphatidylinositol diacylglycerol-lyase (EC 4.6.1.13), a related bacterial enzyme, and glycosylphosphatidylinositol diacylglycerol-lyase (EC 4.6.1.14), a trypanosomal enzyme.

[0265] In particular embodiments, the present disclosure contemplates using a lysophospholipase. A lysophospholipase is an enzyme that catalyzes the chemical reaction:

2-lysophosphatidic acid+H₂O [symbol] glycerol-3-phosphate+a carboxylate

[0266] Thus, the two substrates of this enzyme are 2-lysophosphatidylcholine and H₂O, whereas its two products are glycerophosphocholine and carboxylate.

[0267] Lysophospholipase are are members of the hydrolase family, specifically those acting on carboxylic ester bonds. Lysophospholipases participate in glycerophospholipid metabolism. Examples of lysophospholipases include, but are not limited to, 2-Lysophosphatidylcholine acylhydrolase, Lecithinase B, Lysolecithinase, Phospholipase B, Lysophosphatidase, Lecitholipase, Phosphatidase B, Lysophosphatidylcholine hydrolase, Lysophospholipase A1, Lysophospholipase L1 (TesA), Lysophopholipase L2, TesB, Lysophospholipase transacylase, Neuropathy target esterase, NTE, NTE-LysoPLA, NTE-lysophospholipase, and Vu Patatin 1 protein. In particular embodiments, lysophospholipases utilized according to the present disclosure are derived from a bacteria, e.g., E. coli, or a plant. Any of these lysophospholipases may be used according to various embodiments of the present invention.

[0268] Certain lysophospholipases, such as Lysophospholipase L1 (also referred to as PldC or TesA) are periplasmically-localized or cytoplasmically-localized enzymes that have both lysophospholipase and thioesterase activity, as described above. Hence, certain thioesterases such as TesA can also be characterized as lysophospholipases. A mutant lysophospholipase described herein, PldC(*TesA), is not exported to the periplasm due to deletion of an N-terminal amino acid sequence required for proper transport of TesA from the cytoplasm to the periplasm. This results in a cytoplasmic-localized PldC(*TesA) protein that has access to endogenous acyl-ACP and acyl-CoA intermediates. Overexpressed PldC(*TesA) results in hydrolysis of acyl groups from endogenous acyl-ACP and acyl-CoA molecules. Cells expressing PldC(*TesA) must channel additional cellular carbon and energy to maintain production of acyl-ACP and acyl-coA molecules, which are required for membrane lipid synthesis. Thus, PldC(*TesA) expression results in a net increase in cellular lipid content. As described herein, PldC(*TesA) is expressed in Synechococcus lipid content doubles from 10% of biomass to 20% of biomass.

[0269] In certain embodiments, lysophospholipases utilized according to the present disclosure have both phospholipase and thioesterase activities. Examples of lysophospholipases that have both activities include, e.g., Lysophospholipase L1 (TesA), such as E. coli Lysophospholipase L1, as well as fragments and variants thereof, including those described in the paragraph above. As a phospholipase, certain embodiments may employ TesA variants having only lysophospholipase activity, including variants with reduced or no thioesterase activity.

[0270] In particular embodiments, the phospholipase is a bacterial phospholipase, e.g., lysophospholipase, or a fragment or variant thereof, e.g., a phospholipase derived from Escherichia coli, S. cerevisiae, Rhodococcus, Streptomyces or Acinetobacter species.

[0271] Additional non-limiting examples of phospholipases include phospholipase A1 (PldA) from Acinetobacter sp. ADP1, phospholipase A (PldA) from E. coli, phospholipase from Streptomyces coelicolor A3(2), phospholipase A2 (PLA2-α) from Arabidopsis thaliana; phospholipase A1/triacylglycerol lipase (DAD1; Defective Anther Dehiscence 1) from Arabidopsis thaliana, chloroplast DONGLE from Arabidopsis thaliana, patatin-like protein from Arabidopsis thaliana, and patatin from Anabaena variabilis ATCC 29413. Additional non-limiting examples of lysophospholipases include phospholipase B (Plb1p) from Saccharomyces cerevisiae S288c, phospholipase B (Plb2p) from Saccharomyces cerevisiae S288c, ACIAD1057 (tesA homolog) from Acinetobacter ADP1, ACIAD1943 lysophospholipase from Acinetobacter ADP1, and a lysophospholipase (YP_702320; RHA1_ro02357) from Rhodococcus.

[0272] In particular embodiments, the encoded phospholipase comprises or consists of a Lysophospholipase L1 (TesA), Lysophospholipase L2, TesB, or Vu patatin 1 protein, or a homolog, fragment, or variant thereof. In certain embodiments, the Lysophospholipase L1 (TesA), Lysophospholipase L2, or TesB is a bacterial Lysophospholipase L1 (TesA), Lysophospholipase L2, or TesB, such as an E. coli Lysophospholipase L1 (TesA) having the wild-type sequence set forth in SEQ ID NO:133, an E. coli Lysophospholipase L2 having the wild-type sequence set forth in SEQ ID NO:137, or an E. coli TesB having the wild-type sequence set forth in SEQ ID NO:134. In particular embodiment, the Vu patatin 1 protein has the wild-type sequenc set forth in SEQ ID NO:138.

[0273] In particular embodiments, the phospholipase is modified such that it localizes predominantly to the cytoplasm instead of the periplasm. For example, the phospholipase may have a deletion or mutation in a region associated with periplasmic localization. In particular embodiments, the phospholipase variant is derived from Lysophospholipase L1 (TesA) or TesB. In certain embodiments, the Lysophospholipase L1 (TesA) or TesB variant is a bacterial Lysophospholipase L1 (TesA) or TesB variant, such as a cytoplasmic E. coli Lysophospholipase L1 (PldC(*TesA)) variant having the sequence set forth in SEQ ID NO:121.

[0274] Additional examples of phospholipase polypeptide sequences include phospholipase A1 (PldA) from Acinetobacter sp. ADP1 (SEQ ID NO:157), phospholipase A (PldA) from E. coli (SEQ ID NO:158), phospholipase from Streptomyces coelicolor A3(2) (SEQ ID NO:159), phospholipase A2 (PLA2-α) from Arabidopsis thaliana (SEQ ID NO:160). phospholipase A1/triacylglycerol lipase (DAD1; Defective Anther Dehiscence 1) from Arabidopsis thaliana (SEQ ID NO:161), chloroplast DONGLE from Arabidopsis thaliana (SEQ ID NO:162), patatin-like protein from Arabidopsis thaliana (SEQ ID NO:163), and patatin from Anabaena variabilis ATCC 29413 (SEQ ID NO:164). Additional non-limiting examples of lysophospholipase polypeptide sequences include phospholipase B (Plb1p) from Saccharomyces cerevisiae S288c (SEQ ID NO:165), phospholipase B (Plb2p) from Saccharomyces cerevisiae S288c (SEQ ID NO:166), ACIAD1057 (TesA homolog) from Acinetobacter ADP1 (SEQ ID NO:167), ACIAD1943 lysophospholipase from Acinetobacter ADP1 (SEQ ID NO:168), and a lysophospholipase (YP_702320; RHA1_ro02357) from Rhodococcus (SEQ ID NO:169).

[0275] (iii) Glycogen Synthesis, Storage, and Breakdown

[0276] In particular embodiments, a modified photosynthetic microorganism further comprises additional modifications, such that it has reduced expression of one or more genes associated with a glycogen synthesis or storage pathway and/or increased expression of one or more polynucleotides that encode a protein associated with a glycogen breakdown pathway, or a functional variant of fragment thereof.

[0277] In various embodiments, modified photosynthetic microorganisms, e.g., Cyanobacteria, of the present disclosure have reduced expression of one or more genes associated with glycogen synthesis and/or storage. In particular embodiments, these modified photosynthetic microorganisms have a mutated or deleted gene associated with glycogen synthesis and/or storage. In particular embodiments, these modified photosynthetic microorganisms comprise a vector that includes a portion of a mutated or deleted gene, e.g., a targeting vector used to generate a knockout or knockdown of one or more alleles of the mutated or deleted gene. In certain embodiments, these modified photosynthetic microorganisms comprise an antisense RNA or siRNA that binds to an mRNA expressed by a gene associated with glycogen synthesis and/or storage.

[0278] In certain embodiments, modified photosynthetic microorganisms, e.g., Cyanobacteria, of the present disclosure comprise one or more exogenous or introduced nucleic acids that encode a polypeptide having an activity associated with a glycogen breakdown or triglyceride or fatty acid biosynthesis, including but not limited to any of those described herein. In particular embodiments, the exogenous nucleic acid does not comprise a nucleic acid sequence that is native to the microorganism's genome. In particular embodiments, the exogenous nucleic acid comprises a nucleic acid sequence that is native to the microorganism's genome, but it has been introduced into the microorganism, e.g., in a vector or by molecular biology techniques, for example, to increase expression of the nucleic acid and/or its encoded polypeptide in the microorganism.

[0279] Glycogen Biosynthesis and Storage. Glycogen is a polysaccharide of glucose, which functions as a means of carbon and energy storage in most cells, including animal and bacterial cells. More specifically, glycogen is a very large branched glucose homopolymer containing about 90% α-1,4-glucosidic linkages and 10% α-1,6 linkages. For bacteria in particular, the biosynthesis and storage of glycogen in the form of α-1,4-polyglucans represents an important strategy to cope with transient starvation conditions in the environment.

[0280] Glycogen biosynthesis involves the action of several enzymes. For instance, bacterial glycogen biosynthesis occurs generally through the following general steps: (1) formation of glucose-1-phosphate, catalyzed by phosphoglucomutase (Pgm), followed by (2) ADP-glucose synthesis from ATP and glucose 1-phosphate, catalyzed by glucose-1-phosphate adenylyltransferase (GlgC), followed by (3) transfer of the glucosyl moiety from ADP-glucose to a pre-existing α-1,4 glucan primer, catalyzed by glycogen synthase (GlgA). This latter step of glycogen synthesis typically occurs by utilizing ADP-glucose as the glucosyl donor for elongation of the α-1,4-glucosidic chain.

[0281] In bacteria, the main regulatory step in glycogen synthesis takes place at the level of ADP-glucose synthesis, or step (2) above, the reaction catalyzed by glucose-1-phosphate adenylyltransferase (GlgC), also known as ADP-glucose pyrophosphorylase (see, e.g., Ballicora et al., Microbiology and Molecular Biology Reviews 6:213-225, 2003). In contrast, the main regulatory step in mammalian glycogen synthesis occurs at the level of glycogen synthase. As shown herein, by altering the regulatory and/or other active components in the glycogen synthesis pathway of photosynthetic microorganisms such as Cyanobacteria, and thereby reducing the biosynthesis and storage of glycogen, the carbon that would have otherwise been stored as glycogen can be utilized by the photosynthetic microorganism to synthesize other carbon-based storage molecules, such as lipids, fatty acids, and triglycerides.

[0282] Therefore, certain modified photosynthetic microorganisms, e.g., Cyanobacteria, of the present disclosure may comprise a mutation, deletion, or any other alteration that disrupts one or more of these steps (i.e., renders the one or more steps “non-functional” with respect to glycogen biosynthesis and/or storage), or alters any one or more of the enzymes directly involved in these steps, or the genes encoding them. As noted above, such modified photosynthetic microorganisms, e.g., Cyanobacteria, are typically capable of producing and/or accumulating an increased amount of lipids, such as fatty acids, as compared to a wild type photosynthetic microorganism. Certain exemplary glycogen biosynthesis genes are described below.

[0283] Phosphoglucomutase gene (pgm). In one embodiment, a modified photosynthetic microorganism, e.g., a Cyanobacteria, expresses a reduced amount of the phosphoglucomutase gene. In particular embodiments, it may comprise a mutation or deletion in the phosphoglucomutase gene, including any of its regulatory elements (e.g., promoters, enhancers, transcription factors, positive or negative regulatory proteins, etc.). Phosphoglucomutase (Pgm), encoded by the gene pgm, catalyzes the reversible transformation of glucose 1-phosphate into glucose 6-phosphate, typically via the enzyme-bound intermediate, glucose 1,6-biphosphate (see, e.g., Lu et al., Journal of Bacteriology 176:5847-5851, 1994). Although this reaction is reversible, the formation of glucose-6-phosphate is markedly favored.

[0284] However, typically when a large amount of glucose-6-phosphate is present, Pgm catalyzes the phosphorylation of the 1-carbon and the dephosphorylation of the c-carbon, resulting in glucose-1-phosphate. The resulting glucose-1-phosphate is then converted to UDP-glucose by a number of intermediate steps, including the catalytic activity of GlgC, which can then be added to a glycogen storage molecule by the activity of glycogen synthase, described below. Thus, under certain conditions, the Pgm enzyme plays an intermediary role in the biosynthesis and storage of glycogen.

[0285] The pgm gene is expressed in a wide variety of organisms, including most, if not all, Cyanobacteria. The pgm gene is also fairly conserved among Cyanobacteria, as can be appreciated upon comparison of SEQ ID NOs:24 (S. elongatus PCC7942), 25 (Synechocystis sp. PCC6803), and 26 (Synechococcus sp. WH8102), 79 (Synechococcus RCC307), and 80 (Synechococcus 7002),which provide the polynucleotide sequences of various pgm genes from Cyanobacteria.

[0286] Deletion of the pgm gene in Cyanobacteria, such as Synechococcus, has been demonstrated herein for the first time to reduce the accumulation of glycogen in the Cyanobacteria, and also to increase the production of other carbon-based products, such as lipids and fatty acids.

[0287] Glucose-1-Phosphate Adenylyltransferase (glgC). In one embodiment, a modified photosynthetic microorganism, e.g., a Cyanobacteria, expresses a reduced amount of a glucose-1-phosphate adenylyltransferase (glgC) gene. In certain embodiments, it may comprise a mutation or deletion in the glgC gene, including any of its regulatory elements. The enzyme encoded by the glgC gene (e.g., EC 2.7.7.27) participates generally in starch, glycogen and sucrose metabolism by catalyzing the following chemical reaction:

ATP+alpha-D-glucose 1-phosphate [symbol] diphosphate+ADP-glucose

[0288] Thus, the two substrates of this enzyme are ATP and alpha-D-glucose 1-phosphate, whereas its two products are diphosphate and ADP-glucose. The glgC-encoded enzyme catalyzes the first committed and rate-limiting step in starch biosynthesis in plants and glycogen biosynthesis in bacteria. It is the enzymatic site for regulation of storage polysaccharide accumulation in plants and bacteria, being allosterically activated or inhibited by metabolites of energy flux.

[0289] The enzyme encoded by the glgC gene belongs to a family of transferases, specifically those transferases that transfer phosphorus-containing nucleotide groups (i.e., nucleotidyl-transferases). The systematic name of this enzyme class is typically referred to as ATP:alpha-D-glucose-1-phosphate adenylyltransferase. Other names in common use include ADP glucose pyrophosphorylase, glucose 1-phosphate adenylyltransferase, adenosine diphosphate glucose pyrophosphorylase, adenosine diphosphoglucose pyrophosphorylase, ADP-glucose pyrophosphorylase, ADP-glucose synthase, ADP-glucose synthetase, ADPG pyrophosphorylase, and ADP:alpha-D-glucose-1-phosphate adenylyltransferase.

[0290] The glgC gene is expressed in a wide variety of plants and bacteria, including most, if not all, Cyanobacteria. The glgC gene is also fairly conserved among Cyanobacteria, as can be appreciated upon comparison of SEQ ID NOs:27 (S. elongatus PCC7942), 28 (Synechocystis sp. PCC6803), 29 (Synechococcus sp. PCC 7002), 30 (Synechococcus sp. WH8102), 31 (Synechococcus sp. RCC 307), 32 (Trichodesmium erythraeum IMS 101), 33 (Anabaena varibilis), and 34 (Nostoc sp. PCC 7120), which describe the polynucleotide sequences of various glgC genes from Cyanobacteria.

[0291] Deletion of the glgC gene in Cyanobacteria, such as Synechococcus, reduces the accumulation of glycogen in the Cyanobacteria, and increases the production of other carbon-based products, such as lipids and fatty acids.

[0292] Glycogen Synthase (glgA). In one embodiment, a modified photosynthetic microorganism, e.g., a Cyanobacteria, expresses a reduced amount of a glycogen synthase gene. In particular embodiments, it may comprise a deletion or mutation in the glycogen synthase gene, including any of is regulatory elements. Glycogen synthase (GlgA), also known as UDP-glucose-glycogen glucosyltransferase, is a glycosyltransferase enzyme that catalyses the reaction of UDP-glucose and (1,4-α-D-glucosyl)ₙ to yield UDP and (1,4-α-D-glucosyl)ₙ₊₁. Glycogen synthase is an α-retaining glucosyltransferase that uses ADP-glucose to incorporate additional glucose monomers onto the growing glycogen polymer. Essentially, GlgA catalyzes the final step of converting excess glucose residues one by one into a polymeric chain for storage as glycogen.

[0293] Classically, glycogen synthases, or α-1,4-glucan synthases, have been divided into two families, animal/fungal glycogen synthases and bacterial/plant starch synthases, according to differences in sequence, sugar donor specificity and regulatory mechanisms. However, detailed sequence analysis, predicted secondary structure comparisons, and threading analysis show that these two families are structurally related and that some domains of animal/fungal synthases were acquired to meet the particular regulatory requirements of those cell types.

[0294] Crystal structures have been established for certain bacterial glycogen synthases (see, e.g., Buschiazzo et al., The EMBO Journal 23, 3196-3205, 2004). These structures show that reported glycogen synthase folds into two Rossmann-fold domains organized as in glycogen phosphorlyase and other glycosyltransferases of the glycosyltransferases superfamily, with a deep fissure between both domains that includes the catalytic center. The core of the N-terminal domain of this glycogen synthase consists of a nine-stranded, predominantly parallel, central β-sheet flanked on both sides by seven α-helices. The C-terminal domain (residues 271-456) shows a similar fold with a six-stranded parallel β-sheet and nine α-helices. The last α-helix of this domain undergoes a kink at position 457-460, with the final 17 residues of the protein (461-477) crossing over to the N-terminal domain and continuing as α-helix, a typical feature of glycosyltransferase enzymes.

[0295] These structures also show that the overall fold and the active site architecture of glycogen synthase are remarkably similar to those of glycogen phosphorylase, the latter playing a central role in the mobilization of carbohydrate reserves, indicating a common catalytic mechanism and comparable substrate-binding properties. In contrast to glycogen phosphorylase, however, glycogen synthase has a much wider catalytic cleft, which is predicted to undergo an important interdomain ‘closure’ movement during the catalytic cycle.

[0296] Crystal structures have been established for certain GlgA enzymes (see, e.g., Jin et al., EMBO J 24:694-704, 2005, incorporated by reference). These studies show that the N-terminal catalytic domain of GlgA resembles a dinucleotide-binding Rossmann fold and the C-terminal domain adopts a left-handed parallel beta helix that is involved in cooperative allosteric regulation and a unique oligomerization. Also, communication between the regulator-binding sites and the active site involves several distinct regions of the enzyme, including the N-terminus, the glucose-1-phosphate-binding site, and the ATP-binding site.

[0297] The glgA gene is expressed in a wide variety of cells, including animal, plant, fungal, and bacterial cells, including most, if not all, Cyanobacteria. The glgA gene is also fairly conserved among Cyanobacteria, as can be appreciated upon comparison of SEQ ID NOs:35 (S. elongatus PCC7942), 36 (Synechocystis sp. PCC6803), 37 (Synechococcus sp. PCC 7002), 38 (Synechococcus sp. WH8102), 39 (Synechococcus sp. RCC 307), 40 (Trichodesmium erythraeum IMS 101), 41 (Anabaena variabilis), and 42 (Nostoc sp. PCC 7120), which describe the polynucleotide sequences of various glgA genes from Cyanobacteria.

[0298] Glycogen Breakdown. In certain embodiments, a modified photosynthetic microorganism of the present disclosure expresses an increased amount of one or more polypeptides associated with a glycogen breakdown pathway. In particular embodiments, the one or more polypeptides include glycogen phosphorylase (GlgP), glycogen isoamylase (GlgX), glucanotransferase (MalQ), phosphoglucomutase (Pgm), glucokinase (Glk), and/or phosphoglucose isomerase (Pgi), or a functional fragment or variant thereof, including, for example, those provided in SEQ ID NOs:68, 70, 72, 73, 83 or 85. Examples of additional Pgm polypeptide sequences useful according to the present disclosure are provided in SEQ ID NOs:74, 76, 77, 79, and 81. Pgm, Glk, and Pgi are bidirectional enzymes that can promote glycogen synthesis or breakdown depending on conditions.

[0299] (iv) Polypeptide Variants and Fragments

[0300] As noted above, embodiments of the present disclosure include variants and fragments of any of the reference polypeptides and polynucleotides described herein (see, e.g., the Sequence Listing). Variant polypeptides are biologically active, that is, they continue to possess the enzymatic activity of a reference polypeptide. Such variants may result from, for example, genetic polymorphism and/or from human manipulation.

[0301] Biologically active variants of a reference polypeptide will have at least 40%, 50%, 60%, 70%, generally at least 75%, 80%, 85%, usually about 90% to 95% or more, and typically about 97% or 98% or more sequence similarity or sequence identity to the amino acid sequence for a reference protein as determined by sequence alignment programs described elsewhere herein using default parameters. A biologically active variant of a reference polypeptide may differ from that protein generally by as much 200, 100, 50 or 20 amino acid residues or suitably by as few as 1-15 amino acid residues, as few as 1-10, such as 6-10 amino acid residues, including about 20, 19, 18, 17, 16, 15, 14, 13, 12, 11, 10, 9, 8, 7, 6, 5, 4, 3, 2, or even 1 amino acid residues. In some embodiments, a variant polypeptide differs from the reference sequences referred to herein (see, e.g., the Sequence Listing) by at least one but by less than 15, 10 or 5 amino acid residues. In other embodiments, it differs from the reference sequences by at least one residue but less than 20%, 15%, 10% or 5% of the residues.

[0302] A biologically active fragment can be a polypeptide fragment which is, for example, 10, 11, 12, 13, 14, 15, 16, 17, 18, 19, 20, 21, 22, 23, 24, 25, 26, 27, 28, 29,30, 40, 50, 60, 70, 80, 90, 100, 110, 120, 130, 140, 150, 160, 170, 180, 190, 200, 220, 240, 260, 280, 300, 320, 340, 360, 380, 400, 450, 500, 600 or more contiguous amino acids, including all integers in between, of a reference polypeptide sequence.

[0303] A reference polypeptide may be altered in various ways including amino acid substitutions, deletions, truncations, and insertions. Methods for such manipulations are generally known in the art. For example, amino acid sequence variants of a reference polypeptide can be prepared by mutations in the DNA. Methods for mutagenesis and nucleotide sequence alterations are well known in the art. See, for example, Kunkel (PNAS USA. 82: 488-492, 1985); Kunkel et al., (Methods in Enzymol. 154: 367-382, 1987), U.S. Pat. No. 4,873,192, Watson, J. D. et al., (“Molecular Biology of the Gene,” Fourth Edition, Benjamin/Cummings, Menlo Park, Calif., 1987) and the references cited therein. Guidance as to appropriate amino acid substitutions that do not affect biological activity of the protein of interest may be found in the model of Dayhoff et al., (1978) Atlas of Protein Sequence and Structure (Natl. Biomed. Res. Found., Washington, D.C.).

[0304] Methods for screening gene products of combinatorial libraries made by point mutations or truncation, and for screening cDNA libraries for gene products having a selected property are known in the art. Such methods are adaptable for rapid screening of the gene libraries generated by combinatorial mutagenesis of reference polypeptides. Recursive ensemble mutagenesis (REM), a technique which enhances the frequency of functional mutants in the libraries, can be used in combination with the screening assays to identify polypeptide variants (Arkin and Yourvan, PNAS USA 89: 7811-7815, 1992; Delgrave et al., Protein Engineering. 6: 327-331, 1993). Conservative substitutions, such as exchanging one amino acid with another having similar properties, may be desirable as discussed in more detail below.

[0305] Polypeptide variants may contain conservative amino acid substitutions at various locations along their sequence, as compared to a reference amino acid sequence. A “conservative amino acid substitution” is one in which the amino acid residue is replaced with an amino acid residue having a similar side chain. Families of amino acid residues having similar side chains have been defined in the art, which can be generally sub-classified as follows:

[0306] Acidic: The residue has a negative charge due to loss of H ion at physiological pH and the residue is attracted by aqueous solution so as to seek the surface positions in the conformation of a peptide in which it is contained when the peptide is in aqueous medium at physiological pH. Amino acids having an acidic side chain include glutamic acid and aspartic acid.

[0307] Basic: The residue has a positive charge due to association with H ion at physiological pH or within one or two pH units thereof (e.g., histidine) and the residue is attracted by aqueous solution so as to seek the surface positions in the conformation of a peptide in which it is contained when the peptide is in aqueous medium at physiological pH. Amino acids having a basic side chain include arginine, lysine and histidine.

[0308] Charged: The residues are charged at physiological pH and, therefore, include amino acids having acidic or basic side chains (i.e., glutamic acid, aspartic acid, arginine, lysine and histidine).

[0309] Hydrophobic: The residues are not charged at physiological pH and the residue is repelled by aqueous solution so as to seek the inner positions in the conformation of a peptide in which it is contained when the peptide is in aqueous medium. Amino acids having a hydrophobic side chain include tyrosine, valine, isoleucine, leucine, methionine, phenylalanine and tryptophan.

[0310] Neutral/polar: The residues are not charged at physiological pH, but the residue is not sufficiently repelled by aqueous solutions so that it would seek inner positions in the conformation of a peptide in which it is contained when the peptide is in aqueous medium. Amino acids having a neutral/polar side chain include asparagine, glutamine, cysteine, histidine, serine and threonine.

[0311] This description also characterizes certain amino acids as “small” since their side chains are not sufficiently large, even if polar groups are lacking, to confer hydrophobicity. With the exception of proline, “small” amino acids are those with four carbons or less when at least one polar group is on the side chain and three carbons or less when not. Amino acids having a small side chain include glycine, serine, alanine and threonine. The gene-encoded secondary amino acid proline is a special case due to its known effects on the secondary conformation of peptide chains. The structure of proline differs from all the other naturally-occurring amino acids in that its side chain is bonded to the nitrogen of the α-amino group, as well as the α-carbon. Several amino acid similarity matrices (e.g., PAM120 matrix and PAM250 matrix as disclosed for example by Dayhoff et al., (1978), A model of evolutionary change in proteins. Matrices for determining distance relationships In M. O. Dayhoff, (ed.), Atlas of protein sequence and structure, Vol. 5, pp. 345-358, National Biomedical Research Foundation, Washington D.C.; and by Gonnet et al., (Science. 256: 14430-1445, 1992), however, include proline in the same group as glycine, serine, alanine and threonine. Accordingly, for the purposes of the present invention, proline is classified as a “small” amino acid.

[0312] The degree of attraction or repulsion required for classification as polar or nonpolar is arbitrary and, therefore, amino acids specifically contemplated by the disclosure have been classified as one or the other. Most amino acids not specifically named can be classified on the basis of known behaviour.

[0313] Amino acid residues can be further sub-classified as cyclic or non-cyclic, and aromatic or non-aromatic, self-explanatory classifications with respect to the side-chain substituent groups of the residues, and as small or large. The residue is considered small if it contains a total of four carbon atoms or less, inclusive of the carboxyl carbon, provided an additional polar substituent is present; three or less if not. Small residues are, of course, always non-aromatic. Dependent on their structural properties, amino acid residues may fall in two or more classes. For the naturally-occurring protein amino acids, sub-classification according to this scheme is presented in Table A.

TABLE A
Amino acid sub-classification

| Sub-classes | Amino acids |
|---|---|
| Acidic | Aspartic acid, Glutamic acid |
| Basic | Noncyclic: Arginine, Lysine; Cyclic: Histidine |
| Charged | Aspartic acid, Glutamic acid, Arginine, Lysine, |
| | Histidine |
| Small | Glycine, Serine, Alanine, Threonine, Proline |
| Polar/neutral | Asparagine, Histidine, Glutamine, Cysteine, Serine, |
| | Threonine |
| Polar/large | Asparagine, Glutamine |
| Hydrophobic | Tyrosine, Valine, Isoleucine, Leucine, Methionine, |
| | Phenylalanine, Tryptophan |
| Aromatic | Tryptophan, Tyrosine, Phenylalanine, |
| Residues that | Glycine and Proline |
| influence chain | |
| orientation | |

[0314] Conservative amino acid substitution also includes groupings based on side chains. For example, a group of amino acids having aliphatic side chains is glycine, alanine, valine, leucine, and isoleucine; a group of amino acids having aliphatic-hydroxyl side chains is serine and threonine; a group of amino acids having amide-containing side chains is asparagine and glutamine; a group of amino acids having aromatic side chains is phenylalanine, tyrosine, and tryptophan; a group of amino acids having basic side chains is lysine, arginine, and histidine; and a group of amino acids having sulphur-containing side chains is cysteine and methionine. For example, it is reasonable to expect that replacement of a leucine with an isoleucine or valine, an aspartate with a glutamate, a threonine with a serine, or a similar replacement of an amino acid with a structurally related amino acid will not have a major effect on the properties of the resulting variant polypeptide. Whether an amino acid change results in a functional truncated and/or variant polypeptide can readily be determined by assaying its enzymatic activity, as described herein. Conservative substitutions are shown in Table B under the heading of exemplary substitutions. Amino acid substitutions falling within the scope of the invention, are, in general, accomplished by selecting substitutions that do not differ significantly in their effect on maintaining (a) the structure of the peptide backbone in the area of the substitution, (b) the charge or hydrophobicity of the molecule at the target site, or (c) the bulk of the side chain. After the substitutions are introduced, the variants are screened for biological activity.

TABLE B
Exemplary Amino Acid Substitutions

| | Exemplary | Preferred |
|---|---|---|
| Original Residue | Substitutions | Substitutions |
| Ala | Val, Leu, Ile | Val |
| Arg | Lys, Gln, Asn | Lys |
| Asn | Gln, His, Lys, Arg | Gln |
| Asp | Glu | Glu |
| Cys | Ser | Ser |
| Gln | Asn, His, Lys, | Asn |
| Glu | Asp, Lys | Asp |
| Gly | Pro | Pro |
| His | Asn, Gln, Lys, Arg | Arg |
| Ile | Leu, Val, Met, Ala, Phe, Norleu | Leu |
| Leu | Norleu, Ile, Val, Met, Ala, Phe | Ile |
| Lys | Arg, Gln, Asn | Arg |
| Met | Leu, Ile, Phe | Leu |
| Phe | Leu, Val, Ile, Ala | Leu |
| Pro | Gly | Gly |
| Ser | Thr | Thr |
| Thr | Ser | Ser |
| Trp | Tyr | Tyr |
| Tyr | Trp, Phe, Thr, Ser | Phe |
| Val | Ile, Leu, Met, Phe, Ala, Norleu | Leu |

[0315] Alternatively, similar amino acids for making conservative substitutions can be grouped into three categories based on the identity of the side chains. The first group includes glutamic acid, aspartic acid, arginine, lysine, histidine, which all have charged side chains; the second group includes glycine, serine, threonine, cysteine, tyrosine, glutamine, asparagine; and the third group includes leucine, isoleucine, valine, alanine, proline, phenylalanine, tryptophan, methionine, as described in Zubay, G., Biochemistry, third edition, Wm.C. Brown Publishers (1993).

[0316] Thus, a predicted non-essential amino acid residue in reference polypeptide is typically replaced with another amino acid residue from the same side chain family. Alternatively, mutations can be introduced randomly along all or part of a coding sequence, such as by saturation mutagenesis, and the resultant mutants can be screened for an activity of the parent polypeptide to identify mutants which retain that activity. Following mutagenesis of the coding sequences, the encoded peptide can be expressed recombinantly and the activity of the peptide can be determined. A “non-essential” amino acid residue is a residue that can be altered from the wild-type sequence of an embodiment polypeptide without abolishing or substantially altering one or more of its activities. Suitably, the alteration does not substantially abolish one of these activities, for example, the activity is at least 20%, 40%, 60%, 70% or 80% 100%, 500%, 1000% or more of wild-type. An “essential” amino acid residue is a residue that, when altered from the wild-type sequence of a reference polypeptide, results in abolition of an activity of the parent molecule such that less than 20% of the wild-type activity is present. For example, such essential amino acid residues may include those that are conserved in reference polypeptides across different species, including those sequences that are conserved in the enzymatic sites of reference polypeptides from various sources.

[0317] Accordingly, the present disclosure also contemplates variants of the naturally-occurring reference polypeptide sequences or their biologically-active fragments, wherein the variants are distinguished from the naturally-occurring sequence by the addition, deletion, or substitution of one or more amino acid residues. In general, as noted above, variants will display at least about 30, 40, 50, 55, 60, 65, 70, 75, 80, 85, 90, 91, 92, 93, 94, 95, 96, 97, 98, 99% similarity or sequence identity to a reference polypeptide sequence. Moreover, sequences differing from the native or parent sequences by the addition, deletion, or substitution of 1, 2, 3, 4, 5, 6, 7, 8, 9, 10, 11, 12, 13, 14, 15, 16, 17, 18, 19, 20, 30, 40, 50, 60, 70, 80, 90, 100 or more amino acids but which retain the properties or activities of a parent or reference polypeptide sequence are contemplated.

[0318] In some embodiments, variant polypeptides differ from reference sequence by at least one but by less than 50, 40, 30, 20, 15, 10, 8, 6, 5, 4, 3 or 2 amino acid residue(s). In other embodiments, variant polypeptides differ from a reference sequence by at least 1% but less than 20%, 15%, 10% or 5% of the residues. (If this comparison requires alignment, the sequences should be aligned for maximum similarity. “Looped” out sequences from deletions or insertions, or mismatches, are considered differences.)

[0319] Calculations of sequence similarity or sequence identity between sequences (the terms are used interchangeably herein) are performed as follows. To determine the percent identity of two amino acid sequences, or of two nucleic acid sequences, the sequences are aligned for optimal comparison purposes (e.g., gaps can be introduced in one or both of a first and a second amino acid or nucleic acid sequence for optimal alignment and non-homologous sequences can be disregarded for comparison purposes). In certain embodiments, the length of a reference sequence aligned for comparison purposes is at least 30%, preferably at least 40%, more preferably at least 50%, 60%, and even more preferably at least 70%, 80%, 90%, 100% of the length of the reference sequence. The amino acid residues or nucleotides at corresponding amino acid positions or nucleotide positions are then compared. When a position in the first sequence is occupied by the same amino acid residue or nucleotide as the corresponding position in the second sequence, then the molecules are identical at that position.

[0320] The percent identity between the two sequences is a function of the number of identical positions shared by the sequences, taking into account the number of gaps, and the length of each gap, which need to be introduced for optimal alignment of the two sequences.

[0321] The comparison of sequences and determination of percent identity between two sequences can be accomplished using a mathematical algorithm. In a preferred embodiment, the percent identity between two amino acid sequences is determined using the Needleman and Wunsch, (J. Mol. Biol. 48: 444-453, 1970) algorithm which has been incorporated into the GAP program in the GCG software package, using either a Blossum 62 matrix or a PAM250 matrix, and a gap weight of 16, 14, 12, 10, 8, 6, or 4 and a length weight of 1, 2, 3, 4, 5, or 6. In yet another preferred embodiment, the percent identity between two nucleotide sequences is determined using the GAP program in the GCG software package, using a NWSgapdna.CMP matrix and a gap weight of 40, 50, 60, 70, or 80 and a length weight of 1, 2, 3, 4, 5, or 6. A particularly preferred set of parameters (and the one that should be used unless otherwise specified) are a Blossum 62 scoring matrix with a gap penalty of 12, a gap extend penalty of 4, and a frameshift gap penalty of 5.

[0322] The percent identity between two amino acid or nucleotide sequences can be determined using the algorithm of E. Meyers and W. Miller (Cabios. 4:11-17, 1989) which has been incorporated into the ALIGN program (version 2.0), using a PAM120 weight residue table, a gap length penalty of 12 and a gap penalty of 4.

[0323] The nucleic acid and protein sequences described herein can be used as a “query sequence” to perform a search against public databases to, for example, identify other family members or related sequences. Such searches can be performed using the NBLAST and XBLAST programs (version 2.0) of Altschul, et al., (1990, J. Mol. Biol, 215: 403-10). BLAST nucleotide searches can be performed with the NBLAST program, score=100, wordlength=12 to obtain nucleotide sequences homologous to nucleic acid molecules of the invention. BLAST protein searches can be performed with the XBLAST program, score=50, wordlength=3 to obtain amino acid sequences homologous to protein molecules of the invention. To obtain gapped alignments for comparison purposes, Gapped BLAST can be utilized as described in Altschul et al., (Nucleic Acids Res. 25: 3389-3402, 1997). When utilizing BLAST and Gapped BLAST programs, the default parameters of the respective programs (e.g., XBLAST and NBLAST) can be used.

[0324] In one embodiment, as noted above, polynucleotides and/or polypeptides can be evaluated using a BLAST alignment tool. A local alignment consists simply of a pair of sequence segments, one from each of the sequences being compared. A modification of Smith-Waterman or Sellers algorithms will find all segment pairs whose scores cannot be improved by extension or trimming, called high-scoring segment pairs (HSPs). The results of the BLAST alignments include statistical measures to indicate the likelihood that the BLAST score can be expected from chance alone.

[0325] The raw score, S, is calculated from the number of gaps and substitutions associated with each aligned sequence wherein higher similarity scores indicate a more significant alignment. Substitution scores are given by a look-up table (see PAM, BLOSUM).

[0326] Gap scores are typically calculated as the sum of G, the gap opening penalty and L, the gap extension penalty. For a gap of length n, the gap cost would be G+Ln. The choice of gap costs, G and L is empirical, but it is customary to choose a high value for G (10-15), e.g., 11, and a low value for L (1-2) e.g., 1.

[0327] The bit score, S′, is derived from the raw alignment score S in which the statistical properties of the scoring system used have been taken into account. Bit scores are normalized with respect to the scoring system, therefore they can be used to compare alignment scores from different searches. The terms “bit score” and “similarity score” are used interchangeably. The bit score gives an indication of how good the alignment is; the higher the score, the better the alignment.

[0328] The E-Value, or expected value, describes the likelihood that a sequence with a similar score will occur in the database by chance. It is a prediction of the number of different alignments with scores equivalent to or better than S that are expected to occur in a database search by chance. The smaller the E-Value, the more significant the alignment. For example, an alignment having an E value of e⁻¹¹⁷ means that a sequence with a similar score is very unlikely to occur simply by chance. Additionally, the expected score for aligning a random pair of amino acids is required to be negative, otherwise long alignments would tend to have high score independently of whether the segments aligned were related. Additionally, the BLAST algorithm uses an appropriate substitution matrix, nucleotide or amino acid and for gapped alignments uses gap creation and extension penalties. For example, BLAST alignment and comparison of polypeptide sequences are typically done using the BLOSUM62 matrix, a gap existence penalty of 11 and a gap extension penalty of 1.

[0329] In one embodiment, sequence similarity scores are reported from BLAST analyses done using the BLOSUM62 matrix, a gap existence penalty of 11 and a gap extension penalty of 1.

[0330] In a particular embodiment, sequence identity/similarity scores provided herein refer to the value obtained using GAP Version 10 (GCG, Accelrys, San Diego, Calif.) using the following parameters: % identity and % similarity for a nucleotide sequence using GAP Weight of 50 and Length Weight of 3, and the nwsgapdna.cmp scoring matrix; % identity and % similarity for an amino acid sequence using GAP Weight of 8 and Length Weight of 2, and the BLOSUM62 scoring matrix (Henikoff and Henikoff, PNAS USA. 89:10915-10919, 1992). GAP uses the algorithm of Needleman and Wunsch (J Mol Biol. 48:443-453, 1970) to find the alignment of two complete sequences that maximizes the number of matches and minimizes the number of gaps.

[0331] In one particular embodiment, the variant polypeptide comprises an amino acid sequence that can be optimally aligned with a reference polypeptide sequence (see, e.g., Sequence Listing) to generate a BLAST bit scores or sequence similarity scores of at least about 50, 60, 70, 80, 90, 100, 100, 110, 120, 130, 140, 150, 160, 170, 180, 190, 200, 210, 220, 230, 240, 250, 260, 270, 280, 290, 300, 310, 320, 330, 340, 350, 360, 370, 380, 390, 400, 410, 420, 430, 440, 450, 460, 470, 480, 490, 500, 510, 520, 530, 540, 550, 560, 570, 580, 590, 600, 610, 620, 630, 640, 650, 660, 670, 680, 690, 700, 710, 720, 730, 740, 750, 760, 770, 780, 790, 800, 810, 820, 830, 840, 850, 860, 870, 880, 890, 900, 910, 920, 930, 940, 950, 960, 970, 980, 990, 1000, or more, including all integers and ranges in between, wherein the BLAST alignment used the BLOSUM62 matrix, a gap existence penalty of 11, and a gap extension penalty of 1.

[0332] Variants of a reference polypeptide can be identified by screening combinatorial libraries of mutants of a reference polypeptide. Libraries or fragments e.g., N terminal, C terminal, or internal fragments, of protein coding sequence can be used to generate a variegated population of fragments for screening and subsequent selection of variants of a reference polypeptide.

[0333] Methods for screening gene products of combinatorial libraries made by point mutation or truncation, and for screening cDNA libraries for gene products having a selected property are known in the art. Such methods are adaptable for rapid screening of the gene libraries generated by combinatorial mutagenesis of polypeptides.

[0334] The present disclosure also contemplates the use of chimeric or fusion proteins of the reference polypeptides described herein. As used herein, a “chimeric protein” or “fusion protein” includes a reference polypeptide, or a polypeptide fragment linked to either another reference polypeptide (e.g., to create multiple fragments), to a non-reference polypeptide, or to both. In certain embodiments, a reference polypeptide can be fused to a heterologous polypeptide sequence. A “heterologous polypeptide” typically has an amino acid sequence corresponding to a protein which is different from the reference protein sequence, and which can be derived from the same or a different organism. The reference polypeptide of the fusion protein can correspond to all or a portion of a biologically active amino acid sequence.

[0335] In certain embodiments, a fusion protein includes at least one or two biologically active portions of reference protein. The polypeptides forming the fusion protein are typically linked C-terminus to N-terminus, although they can also be linked C-terminus to C-terminus, N-terminus to N-terminus, or N-terminus to C-terminus. The polypeptides of the fusion protein can be in any order.

[0336] The fusion partner may be designed and included for essentially any desired purpose provided they do not adversely affect the enzymatic activity of the polypeptide. For example, in one embodiment, a fusion partner may comprise a sequence that assists in expressing the protein (an expression enhancer) at higher yields than the native recombinant protein. Other fusion partners may be selected so as to increase the solubility or stability of the protein or to enable the protein to be targeted to desired intracellular compartments.

[0337] The fusion protein can include a moiety which has a high affinity for a ligand. For example, the fusion protein can be a GST-fusion protein in which the reference polypeptide sequences are fused to the C-terminus of the GST sequences. Such fusion proteins can facilitate the purification and/or identification of the resulting polypeptide. Alternatively, the fusion protein can be reference polypeptide containing a heterologous signal sequence at its N-terminus. In certain host cells, expression and/or secretion of such proteins can be increased through use of a heterologous signal sequence.

[0338] Fusion proteins may generally be prepared using standard techniques, described elsewhere herein. A peptide linker sequence may be employed to separate the first and second polypeptide components by a distance sufficient to ensure that each polypeptide folds into its secondary and tertiary structures, if desired. Exemplary peptide linkers are described elsewhere herein.

[0339] Polynucleotides and Vectors

[0340] Embodiments of the present disclosure include polynucleotides encoding a diacylglyceroltransferase (DGAT) fusion protein described herein, the fusion protein comprising at least one DGAT polypeptide fused to at least one intracellular localization domain, such as a bacteria membrane- or bacterial plasma membrane (PM)-targeting domain. Such polynucleotides can be partially or fully isolated from other cellular components, within a vector, for example, a composition comprising such a vector (e.g., in a tube or kit), or in a host cell, such as modified photosynthetic microorganism.

[0341] These polynucleotides and modified photosynthetic microorganisms comprising the same may optionally comprise one or more (introduced) polynucleotides encoding a lipid biosynthesis protein, and/or one or more (introduced) polynucleotides encoding a polypeptide associated with glycogen breakdown.

[0342] Also included are nucleotide sequences that encode any functional naturally-occurring variants or fragments (e.g., allelic variants, orthologs, splice variants) or non-naturally occurring variants or fragments of these native polynucleotides (i.e., optimized by engineering), as well as compositions comprising such polynucleotides, including, for example, cloning and expression vectors.

[0343] Also, the modified photosynthetic microorganisms described herein may optionally comprise a mutation or deletion in one or more genes associated with glycogen biosynthesis or storage, alone or in combination with the presence of overexpressed proteins associated with lipid biosynthesis proteins and/or glycogen breakdown. Certain modified photosynthetic microorganisms, for example, for the production of wax esters, may optionally comprise a mutation or deletion in or more genes encoding an aldehyde decarbonylase, an aldehyde dehydrogenase, or both, either alone or in combination with the presence of overexpressed proteins associated with lipid biosynthesis proteins and/or glycogen breakdown.

[0344] The recitations “mutation” or “deletion,” in this context refer generally to those changes or alterations in a photosynthetic microorganism, e.g., a Cyanobacterium, that render the product of that gene non-functional or having reduced function. Examples of such changes or alterations include nucleotide substitutions, deletions, or additions/insertions to the coding or regulatory sequences of a targeted gene (e.g., glgA, glgC, pgm, aldehyde decarbonylase, aldehyde dehydrogenase), in whole or in part, which disrupt, eliminate, down-regulate, or significantly reduce the expression of the polypeptide encoded by that gene, whether at the level of transcription, translation, post-translational modification, or protein stability. Such alterations can also reduce the enzymatic activity or other functional characteristic of the protein (e.g., localization), with or without reducing expression.

[0345] Techniques for producing such alterations or changes, such as by recombination with a vector having a selectable marker, are exemplified herein and known in the molecular biological art. In particular embodiments, one or more alleles of a gene, e.g., two or all alleles, may be mutated or deleted within a photosynthetic microorganism. In particular embodiments, modified photosynthetic microorganisms, e.g., Cyanobacteria, of the present disclosure are merodiploids or partial diploids.

[0346] The “deletion” of a targeted gene or polypeptide may also be accomplished by targeting the mRNA of that gene, such as by using various antisense technologies (e.g., antisense oligonucleotides and siRNA) known in the art. Accordingly, targeted genes may be considered “non-functional” when the polypeptide or enzyme encoded by that gene is not expressed by the modified photosynthetic microorganism, or is expressed in negligible amounts.

[0347] As used herein, the terms “DNA” and “polynucleotide” and “nucleic acid” include a DNA molecule that has been isolated free of total genomic DNA of a particular species. Therefore, a DNA segment encoding a polypeptide refers to a DNA segment that contains one or more coding sequences yet is substantially isolated away from, or purified free from, total genomic DNA of the species from which the DNA segment is obtained. Included within the terms “DNA segment” and “polynucleotide” are DNA segments and smaller fragments of such segments, and also recombinant vectors, including, for example, plasmids, cosmids, phagemids, phage, viruses, and the like.

[0348] As will be understood by those skilled in the art, the polynucleotide sequences of this disclosure can include genomic sequences, extra-genomic and plasmid-encoded sequences and smaller engineered gene segments that express, or may be adapted to express, proteins, polypeptides, peptides and the like. Such segments may be naturally isolated, or modified synthetically by the hand of man.

[0349] Polynucleotides may be single-stranded (coding or antisense) or double-stranded, and may be DNA (genomic, cDNA or synthetic) or RNA molecules. Additional coding or non-coding sequences may, but need not, be present within a polynucleotide of the present invention, and a polynucleotide may, but need not, be linked to other molecules and/or support materials.

[0350] Polynucleotides may comprise a native sequence (e.g., an endogenous sequence that encodes protein described herein) or may comprise a variant or fragment, or a biological functional equivalent of such a sequence. Polynucleotide variants may contain one or more substitutions, additions, deletions and/or insertions, as further described herein, preferably such that the enzymatic activity of the encoded polypeptide is not substantially diminished relative to the unmodified or reference polypeptide. The effect on the enzymatic activity of the encoded polypeptide may generally be assessed as described herein and known in the art.

[0351] (i) Intracellular Localization Domain-DGAT Fusion Polynucleotides

[0352] Embodiments of the present disclosure include polynucleotides (e.g., isolated polynucleotides) that encode any of the intracellular localization domain-DGAT fusion proteins described herein, such as the membrane-targeting domain-DGAT fusion proteins. These polynucleotides comprise at least one sequence encoding a heterologous intracellular localization domain described herein, which is fused in-frame to at least one sequence encoding a DGAT polypeptide, or an active fragment or variant thereof.

[0353] Certain embodiments thus include polynucleotides that encode any one or more of the intracellular localization domains described herein, where such polynucleotide(s) are fused in-frame to a DGAT-encoding polynucleotide. Exemplary sequences that encode a membrane-targeting domain can be found within SEQ ID NOs:200 or 202, the respective PCC7942-0858 and PCC7942-1015 coding sequences of two methyl-accepting chemotaxis (MCP) proteins from S. elongatus. For instance, in certain embodiments, the polynucleotide sequence may include about the N-terminal 129 nucleotides of SEQ ID NO:200 (PCC7942-0858), which encodes the leader sequence of the MCP protein encoded by the PCC7942-0858 gene; additional sequences can also be included, for instance, about the N-terminal 132, 135, 138, 141, 144, 147, 150, 153, 156, 159, 162, 165, 168, 171, 174, 177, 180 or more nucleotides of SEQ ID NO:200 (PCC7942-0858).

[0354] Also included are polynucleotides that encode any one or more of the DGAT polypeptides described herein, where such polynucleotide(s) are fused in-frame to a heterologous intracellular localization domain-encoding polynucleotide. In certain embodiments, a DGAT-encoding portion of the fusion protein encodes a DGAT comprising or consisting of a polypeptide sequence set forth in any one of SEQ ID NOs:58, 59, 60 or 61, or a fragment or variant thereof. SEQ ID NO:58 is the sequence of DGATn; SEQ ID NO: 59 is the sequence of Streptomyces coelicolor DGAT (ScoDGAT or SDGAT); SEQ ID NO:60 is the sequence of Alcanivorax borkumensis DGAT (AboDGAT); and SEQ ID NO:61 is the sequence of DGATd (Acinetobacter baylii sp.).

[0355] In certain embodiments, a DGAT-encoding portion of the fusion protein comprises or consists of a polynucleotide sequence set forth in any one of SEQ ID NOs:62, 63, 64, 65 or 66, or a fragment or variant thereof. SEQ ID NO:62 is a codon-optimized for expression in Cyanobacteria sequence that encodes DGATn; SEQ ID NO:63 has homology to SEQ ID NO:62; SEQ ID NO:64 is a codon-optimized for expression in Cyanobacteria sequence that encodes ScoDGAT; SEQ ID NO:65 is a codon-optimized for expression in Cyanobacteria sequence that encodes AboDGAT; and SEQ ID NO:66 is a codon-optimized for expression in Cyanobacteria sequence that encodes DGATd. DGATn and DGATd correspond to Acinetobacter baylii DGAT and a modified form thereof, which includes two additional amino acid residues immediately following the initiator methionine.

[0356] (ii) Lipid Biosynthesis Genes

[0357] In certain embodiments, a modified photosynthetic microorganism comprises an introduced polynucleotide that encodes one or more lipid biosynthesis proteins. In some instances, a modified photosynthetic microorganism comprises an endogenous polynucleotide that encodes a lipid biosynthesis gene, where a regulatory element such as a promoter is introduced upstream of that polynucleotide to regulate or alter expression of the encoded protein.

[0358] In particular embodiments, a modified photosynthetic microorganism comprises reduced or eliminated expression or activity of a lipid biosynthesis polypeptide. Included are full or partial deletions, and point mutations or insertions of an endogenous lipid biosynthesis gene that reduce or eliminate expression and/or activity of the encoded polypeptide.

[0359] Exemplary lipid biosynthesis genes encode polypeptides such as acyl carrier proteins (ACP), acyl ACP synthases (Aas), acyl-ACP reductases, alcohol dehydrogenases, aldehyde dehydrogenases, aldehyde decarbonylases, thioesterases (TES), acetyl coenzyme A carboxylases (ACCase), phosphatidic acid phosphatases (PAP; or phosphatidate phosphatases), triacylglycerol (TAG) hydrolases, fatty acyl-CoA synthetases, and lipases/phospholipases, as described herein.

[0360] Acyl Carrier Proteins. In certain embodiments, a modified photosynthetic microorganism comprises one or more polynucleotides encoding one or more acyl carrier proteins (ACP). Exemplary ACP nucleotide sequences include SEQ ID NO:5 from Synechococcus elongatus PCC7942, SEQ ID NOS:7, 9, and 11 from Acinetobacter sp. ADP1, and SEQ ID NO:13 from Spinacia oleracea.

[0361] Acyl ACP Synthases (Aas). In certain embodiments, a modified photosynthetic microorganism comprises one or more polynucleotides encoding one or more acyl-ACP synthetase (Aas) enzymes. In certain embodiments, the Aas nucleotide sequence is derived from the Se918 gene of Synechococcus elongatus. One exemplary Aas sequence nucleotide sequence is SEQ ID NO:43 from Synechococcus elongatus PCC 7942.

[0362] In particular embodiments, a modified photosynthetic microorganism of the present disclosure has a mutation such as a point mutation, insertion, or full or partial deletion of one or more endogenous Aas genes, for instance, the Se918 gene of S. elongatus PCC7942, to reduce or eliminate expression and/or activity of the encoded Aas polypeptide.

[0363] Acyl-ACP Reductases. In certain embodiments, a modified photosynthetic microorganism comprises one or more polynucleotides encoding one or more acyl-ACP reductase polypeptides. Exemplary acyl-ACP reductase nucleotide sequences include orf1594 from Synechococcus elongatus PCC7942 (SEQ ID NO:1), and orfsll0209 from Synechocystis sp. PCC6803 (SEQ ID NO:3).

[0364] Alcohol Dehydrogenases. Certain embodiments may employ one or more alcohol dehydrogenase encoding polynucleotide sequences. Exemplary alcohol dehydrogenases include slr1192 of Synechocystis sp. PCC6803 (SEQ ID NO:104) and ACIAD3612 from Acinetobacter baylii (SEQ ID NO:106).

[0365] Aldehyde Dehydrogenases. Certain embodiments may employ one or more aldehyde dehydrogenase encoding polynucleotide sequences. Certain embodiments, for example, for the production of triglycerides or wax esters, may comprise mutations such as point mutations, insertions, or full or partial deletions of one or more endogenous aldehyde dehydrogenase genes. One exemplary aldehyde dehydrogenase is orf0489 of Synechococcus elongatus PCC7942 (SEQ ID NO:102).

[0366] Aldehyde Decarbonylases. Certain embodiments, for example, for the production of triglycerides or wax esters, may comprise mutations such as point mutations, insertions, or full or partial deletions of one or more endogenous aldehyde decarbonylase genes. One example of an aldehyde decarbonylase is encoded by orf1593 in S. elongatus PCC7942. Another example is an aldehyde decarbonylase encoded by orfsll0208 in Synechocystis sp. PCC6803.

[0367] Thioesterases (TES). In certain embodiments, a modified photosynthetic microorganism comprises one or more polynucleotides encoding one or more thioesterases (TES) including acyl-ACP thioesterases and/or acyl-CoA thioesterases. In certain embodiments, the polynucleotide sequence of the TES encodes a TesA or TesB polypeptide from E. coli, or a cytoplasmic TesA variant (*TesA) having the sequence set forth in SEQ ID NO:121.

[0368] In certain embodiments, the polynucleotide sequence of the TES comprises that of the FatB gene, encoding a FatB enzyme, such as a C8, C12, C14, C16, or C18 FatB enzyme. In certain embodiments, the polynucleotide encodes a thioesterase (e.g., FatB thioesterase), having only thioesterase activity and little or no lysophospholipase activity. In certain embodiments, the thioesterase is a FatB acyl-ACP thioesterase, which can hydrolyze acyl-ACP but not acyl-CoA. SEQ ID NO:197 is an exemplary nucleotide sequence of a C8/C10 FatB2 thioesterase derived from Cuphea hookeriana, and SEQ ID NO:122 is codon-optimized for expression in Cyanobacteria. SEQ ID NO:123 is an exemplary nucleotide sequence of a C12 FatB1 acyl-ACP thioesterase derived from Umbellularia califomica, and SEQ ID NO:124 is a codon-optimized version of SEQ ID NO:123 for optimal expression in Cyanobacteria. SEQ ID NO:126 is an exemplary nucleotide sequence of a C14 FatB1 thioesterase derived from Cinnamomum camphora, and SEQ:125 is a codon-optimized version of SEQ ID NO:126. SEQ ID NO:127 is an exemplary nucleotide sequence of a C16 FatB1 thioesterase derived from Cuphea hookeriana, and SEQ ID NO:128 is a codon-optimized version of SEQ ID NO:127. In certain embodiments, one or more FatB sequences are operably linked to a strong promoter, such as a Ptrc promoter. In other embodiments, one or more FatB sequences are operably linked to a relatively weak promoter, such as an arabinose promoter.

[0369] Acetyl Coenzyme A carboxylases (ACCase). In certain embodiments, a polynucleotide encodes an acetyl-CoA carboxylase (ACCase) comprising or consisting of a polypeptide sequence set forth in any of SEQ ID NOs:55, 45, 46, 47, 48 or 49, or a fragment or variant thereof. In particular embodiments, a ACCase polynucleotide comprises or consists of a polynucleotide sequence set forth in any of SEQ ID NOs:56, 57, 50, 51, 52, 53 or 54, or a fragment or variant thereof. SEQ ID NO:55 is the sequence of Saccharomyces cerevisiae acetyl-CoA carboxylase (yAcc1); and SEQ ID NO:56 is a codon-optimized for expression in Cyanobacteria sequence that encodes yAcc1. SEQ ID NO:45 is Synechococcus sp. PCC 7002 AccA; SEQ ID NO:46 is Synechococcus sp. PCC 7002 AccB; SEQ ID NO:47 is Synechococcus sp. PCC 7002 AccC; and SEQ ID NO:48 is Synechococcus sp. PCC 7002 AccD. SEQ ID NO:50 encodes Synechococcus sp. PCC 7002 AccA; SEQ ID NO:51 encodes Synechococcus sp. PCC 7002 AccB; SEQ ID NO:52 encodes Synechococcus sp. PCC 7002 AccC; and SEQ ID NO:53 encodes Synechococcus sp. PCC 7002 AccD. SEQ ID NO:49 is a Triticum aestivum ACCase; and SEQ ID NO:54 encodes this Triticum aestivum ACCase.

[0370] Phosphatidic Acid Phosphatases (PAP). In certain embodiments, a polynucleotide encodes a phosphatidate phosphatase (also referred to as a phosphatidic acid phosphatase; PAP) comprising or consisting of a polypeptide sequence set forth in SEQ ID NO:131, or a fragment or variant thereof. In particular embodiments, a phosphatidate phosphatase polynucleotide comprises or consists of a polynucleotide sequence set forth in SEQ ID NO:129 or SEQ ID NO:130, or a fragment or variant thereof. SEQ ID NO:131 is the sequence of Saccharomyces cerevisiae phosphatidate phosphatase (yPAH1), and SEQ ID NO:129 is a codon-optimized for expression in Cyanobacteria sequence that encodes yPAH1. In certain embodiments, the nucleotide sequence of the PAP is derived from the E. coli PgpB gene, and/or the PAP gene from Synechocystis sp. PCC6803.

[0371] Triacylglycerol (TAG) Hydrolases. Certain embodiments employ one or more TAG hydrolase encoding polynucleotide sequences. Non-limiting examples of TAG hydrolase polynucleotide sequences include SDP1 (SUGAR-DEPENDENT1) triacylglycerol lipase from Arabidopsis thaliana (SEQ ID NO:153), ACIAD1335 from Acinetobacter sp. ADP1 (SEQ ID NO:154), TG14P from S. cerevisiae (SEQ ID NO:175), and RHA1_ro04722 (YP_704665) TAG lipase from Rhodococcus (SEQ ID NO:155). Additional polynucleotide sequences for exemplary lipases/esterases include RHA1_ro01602 lipase/esterase from Rhodococcus sp. (see SEQ ID NO:156), and the RHA1_ro06856 lipase/esterase (see SEQ ID NO:119) from Rhodococcus sp.

[0372] Fatty Acyl-CoA Synthetases. Certain embodiments employ one or more fatty acyl-CoA synthetase encoding polynucleotide sequences. One exemplary fatty acyl-CoA synthetase includes the FadD gene from E. coli (SEQ ID NO:16) which encodes a fatty acyl-CoA synthetase having substrate specificity for medium and long chain fatty acids. Other exemplary fatty acyl-CoA synthetases include those derived from S. cerevisiae; for example, the Faa1p coding sequence is set forth in SEQ ID NO:18, the Faa2p coding sequence is set forth in SEQ ID NO:20, and the Faa3p is set forth in SEQ ID NO:22. SEQ ID NO:22 is codon-optimized for expression in S. elongatus PCC7942.

[0373] Lipases/Phospholipases. In certain embodiments, a modified photosynthetic microorganism comprises one or more polynucleotides encoding one or more lipases or phospholipases, including lysophospholipases, or a fragment or variant thereof. In certain embodiments, the encoded lysophospholipase is Lysophospholipase L1 (TesA), Lysophospholipase L2, TesB, Vu Patatin 1 protein, or a homolog thereof.

[0374] In particular embodiments, the encoded phospholipase, e.g., a lysophospholipase, is a bacterial phospholipase, or a fragment or variant thereof, and the polynucleotide comprises a bacterial phospholipase polynucleotide sequence, e.g., a sequence derived from Escherichia coli, Enterococcus faecalis, or Lactobacillus plantarum. In particular embodiments, the encoded phospholipase is Lysophospholipase L1 (TesA), Lysophospholipase L2, TesB, Vu Patatin 1 protein, or a functional fragment thereof.

[0375] In certain embodiments, a lysophospholipase is a bacterial Lysophospholipase L1 (TesA) or TesB, such as an E. coli Lysophospholipase L1 encoded by a polynucleotide (pldC) having the wild-type sequence set forth in SEQ ID NO:196, or an E. coli TesB encoded by a polynucleotide having the wild-type sequence set forth in SEQ ID NO:132. The polypeptide sequence of E. coli Lysophospholipase L1 is provided in SEQ ID NO:133, and the polypeptide sequence of E. coli TesB is provided in SEQ ID NO:134. In other embodiments, a lysophospholipase is a Lysophospholipase L2, such as an E. coli Lysophospholipase L2 encoded by a polynucleotide (pldB) having the wild-type sequence set forth in SEQ ID NO:135, or a Vu patatin 1 protein encoded by a polynucleotide having the wild-type sequence set forth in SEQ ID NO:136. The polypeptide sequence of E. coli Lysophospholipase L2 is provided in SEQ ID NO:137, and the polypeptide sequence of Vu patatin 1 protein is provided in SEQ ID NO:138.

[0376] In particular embodiments, the polynucleotide encoding the phospholipase variant is modified such that it encodes a phospholipase that localizes predominantly to the cytoplasm instead of the periplasm. For example, it may encode a phospholipase having a deletion or mutation in a region associated with periplasmic localization. In particular embodiments, the encoded phospholipase variant is derived from Lysophospholipase L1 (TesA). In certain embodiments, the Lysophospholipase L1 (TesA) variant is a bacterial TesA, such as an E. coli Lysophospholipase (TesA) variant encoded by a polynucleotide having the sequence set forth in SEQ ID NO:139. The polypeptide sequence of the Lysophospholipase L1 variant is provided in SEQ ID NO:121 (PldC(*TesA)).

[0377] Additional examples of phospholipase-encoding polynucleotide sequences include phospholipase A1 (PldA) from Acinetobacter sp. ADP1 (SEQ ID NO:140), phospholipase A (PldA) from E. coli (SEQ ID NO:141), phospholipase from Streptomyces coelicolor A3(2) (SEQ ID NO:142), phospholipase A2 (PLA2-α) from Arabidopsis thaliana (SEQ ID NO:143). phospholipase A1/triacylglycerol lipase (DAD1; Defective Anther Dehiscence 1) from Arabidopsis thaliana (SEQ ID NO:144), chloroplast DONGLE from Arabidopsis thaliana (SEQ ID NO:145), patatin-like protein from Arabidopsis thaliana (SEQ ID NO:146), and patatin from Anabaena variabilis ATCC 29413 (SEQ ID NO:147). Additional non-limiting examples of lysophospholipase-encoding polynucleotide sequences include phospholipase B (Plb1p) from Saccharomyces cerevisiae S288c (SEQ ID NO:148), phospholipase B (Plb2p) from Saccharomyces cerevisiae S288c (SEQ ID NO:149), ACIAD1057 (TesA homolog) from Acinetobacter ADP1 (SEQ ID NO:150), ACIAD1943 lysophospholipase from Acinetobacter ADP1 (SEQ ID NO:151), and a lysophospholipase (YP_702320; RHA1_ro02357) from Rhodococcus (SEQ ID NO:152).

[0378] (iii) Glycogen Biosynthesis, Storage, and Breakdown Genes

[0379] Glycogen Biosynthesis and Storage Genes. As noted above, certain embodiments include reduced or eliminated expression and/or activity of one or more polypeptides associated with glycogen biosynthesis and/or storage, for instance, by mutation of one or more genes that encode such polypeptides. Included are full or partial deletions, and point mutations or insertions of one or more glycogen biosynthesis/storage genes that reduce or eliminate expression and/or biological activity of the encoded protein(s). Exemplary genes associated with glycogen synthesis and/or storage include glgC, pgm, and glgA.

[0380] Examples of such glgC polynucleotide sequences are provided in SEQ ID NOs:28 (Synechocystis sp. PCC6803), 34 (Nostoc sp. PCC 7120), 33 (Anabaena variabilis), 32 (Trichodesmium erythraeum IMS 101), 27 (Synechococcus elongatus PCC7942), 30 (Synechococcus sp. WH8102), 31 (Synechococcus sp. RCC 307), and 29 (Synechococcus sp. PCC 7002), which respectively encode GlgC polypeptides having sequences set forth in SEQ ID NOs: 86, 87, 88, 89, 90, 91, 92, and 93.

[0381] Examples of such pgm polynucleotide sequences are provided in SEQ ID NOs: 25 (Synechocystis sp. PCC6803), 75 (Synechococcus elongatus PCC7942), 26 (Synechococcus sp. WH8102), 78 (Synechococcus RCC307), and 80 (Synechococcus 7002), which respectively encode Pgm polypeptides having sequences set forth in SEQ ID NOs:74, 76, 77, 79 and 81.

[0382] Examples of such glgA polynucleotide sequences are provided in SEQ ID NOs:36 (Synechocystis sp. PCC6803), 42 (Nostoc sp. PCC 7120), 41 (Anabaena variabilis), 40 (Trichodesmium erythraeum IMS 101), 35 (Synechococcus elongatus PCC7942), 38 (Synechococcus sp. WH8102), 39 (Synechococcus sp. RCC 307), and 37 (Synechococcus sp. PCC 7002), which respectively encode GlgA polypeptides having sequences set forth in SEQ ID NOs:94, 95, 96, 97, 98, 99, 100 and 101.

[0383] Glycogen Breakdown Genes. In certain embodiments, a modified photosynthetic microorganism comprise one or more polynucleotides encoding one or more polypeptides associated with a glycogen breakdown, or a fragment or variant thereof. In particular embodiments, the one or more polypeptides are glycogen phosphorylase (GlgP), glycogen isoamylase (GlgX), glucanotransferase (MalQ), phosphoglucomutase (Pgm), glucokinase (Glk), and/or phosphoglucose isomerase (Pgi), or a functional fragment or variant thereof.

[0384] A representative glgP polynucleotide sequence is provided in SEQ ID NO:67, and a representative GlgP polypeptide sequence is provided in SEQ ID NO:68. A representative glgX polynucleotide sequence is provided in SEQ ID NO:69, and a representative GlgX polypeptide sequence is provided in SEQ ID NO:70. A representative malQ polynucleotide sequence is provided in SEQ ID NO:71, and a representative MalQ polypeptide sequence is provided in SEQ ID NO:72. A representative phosphoglucomutase (pgm) polynucleotide sequence is provided in SEQ ID NO:24, and a representative phosphoglucomutase (Pgm) polypeptide sequence is provided in SEQ ID NO:73, with others provided infra (SEQ ID NOs:25, 26, 74-81). A representative glk polynucleotide sequence is provided in SEQ ID NO:82, and a representative Glk polypeptide sequence is provided in SEQ ID NO:83. A representative pgi polynucleotide sequence is provided in SEQ ID NO:84, and a representative Pgi polypeptide sequence is provided in SEQ ID NO:85.

[0385] (iv) Polynucleotide Variants, Fragments, Vectors, and Expression Systems

[0386] In particular embodiments, a polynucleotide comprises one of these polynucleotide sequences, or a fragment or variant thereof, or encodes one of these polypeptide sequences, or a fragment or variant thereof.

[0387] Exemplary nucleotide sequences that encode the proteins and enzymes of the application encompass full-length reference polynucleotides, as well as portions of the full-length or substantially full-length nucleotide sequences of these genes or their transcripts or DNA copies of these transcripts. Portions of a nucleotide sequence may encode polypeptide portions or segments that retain the biological activity of the reference polypeptide. A portion of a nucleotide sequence that encodes a biologically active fragment of an enzyme provided herein may encode at least about 20, 21, 22, 23, 24, 25, 30, 40, 50, 60, 70, 80, 90, 100, 120, 150, 200, 300, 400, 500, 600, or more contiguous amino acid residues, almost up to the total number of amino acids present in a full-length enzyme. It will be readily understood that “intermediate lengths,” in this context and in all other contexts used herein, means any length between the quoted values, such as 101, 102, 103, etc.; 151, 152, 153, etc.; 201, 202, 203, etc.

[0388] The polynucleotides described herein, regardless of the length of the coding sequence itself, may be combined with other DNA sequences, such as promoters, polyadenylation signals, additional restriction enzyme sites, multiple cloning sites, other coding segments, and the like, such that their overall length may vary considerably. It is therefore contemplated that a polynucleotide fragment of almost any length may be employed, with the total length preferably being limited by the ease of preparation and use in the intended recombinant DNA protocol.

[0389] The disclosure also contemplates variants of the reference polynucleotide sequences described herein (see, e.g., the Sequence Listing). Nucleic acid variants can be naturally-occurring, such as allelic variants (same locus), homologs (different locus), and orthologs (different organism) or can be non naturally-occurring. Naturally occurring variants such as these can be identified and isolated using well-known molecular biology techniques including, for example, various polymerase chain reaction (PCR) and hybridization-based techniques as known in the art. Naturally occurring variants can be isolated from any organism that encodes one or more genes having an activity of a reference polypeptide. Embodiments of the present invention, therefore, encompass Cyanobacteria comprising such naturally-occurring polynucleotide variants.

[0390] Non-naturally occurring variants can be made by mutagenesis techniques, including those applied to polynucleotides, cells, or organisms. The variants can contain nucleotide substitutions, deletions, inversions and insertions. Variation can occur in either or both the coding and non-coding regions. In certain aspects, non-naturally occurring variants may have been optimized for use in Cyanobacteria, such as by engineering and screening the enzymes for increased activity, stability, or any other desirable feature.

[0391] The variations can produce both conservative and non-conservative amino acid substitutions (as compared to the originally encoded product). For nucleotide sequences, conservative variants include those sequences that, because of the degeneracy of the genetic code, encode the amino acid sequence of a reference polypeptide. Variant nucleotide sequences also include synthetically derived polynucleotide sequences, such as those generated, for example, by using site-directed mutagenesis but which still encode a biologically active reference polypeptide, as described elsewhere herein. Generally, variants of a particular polynucleotide sequence will have at least about 30%, 40% 50%, 55%, 60%, 65%, 70%, generally at least about 75%, 80%, 85%, 90%, 95% or 98% or more sequence identity to a reference polynucleotide sequence as determined by sequence alignment programs described elsewhere herein using default parameters.

[0392] Known reference polynucleotide sequences (e.g., described herein) can be used to isolate corresponding sequences and alleles from other organisms, particularly other microorganisms. Methods are readily available in the art for the hybridization of nucleic acid sequences. Coding sequences from other organisms may be isolated according to well known techniques based on their sequence identity with the coding sequences set forth herein. In these techniques all or part of the known coding sequence is used as a probe which selectively hybridizes to other reference coding sequences present in a population of cloned genomic DNA fragments or cDNA fragments (i.e., genomic or cDNA libraries) from a chosen organism.

[0393] Accordingly, the present disclosure also contemplates polynucleotides that hybridize to reference nucleotide sequences, or to their complements, under stringency conditions described below. As used herein, the term “hybridizes under low stringency, medium stringency, high stringency, or very high stringency conditions” describes conditions for hybridization and washing. Guidance for performing hybridization reactions can be found in Ausubel et al, (1998, supra), Sections 6.3.1-6.3.6. Aqueous and non-aqueous methods are described in that reference and either can be used.

[0394] Reference herein to “low stringency” conditions include and encompass from at least about 1% v/v to at least about 15% v/v formamide and from at least about 1 M to at least about 2 M salt for hybridization at 42° C., and at least about 1 M to at least about 2 M salt for washing at 42° C. Low stringency conditions also may include 1% Bovine Serum Albumin (BSA), 1 mM EDTA, 0.5 M NaHPO₄ (pH 7.2), 7% SDS for hybridization at 65° C., and (i) 2×SSC, 0.1% SDS; or (ii) 0.5% BSA, 1 mM EDTA, 40 mM NaHPO₄ (pH 7.2), 5% SDS for washing at room temperature. One embodiment of low stringency conditions includes hybridization in 6× sodium chloride/sodium citrate (SSC) at about 45° C., followed by two washes in 0.2×SSC, 0.1% SDS at least at 50° C. (the temperature of the washes can be increased to 55° C. for low stringency conditions).

[0395] “Medium stringency” conditions include and encompass from at least about 16% v/v to at least about 30% v/v formamide and from at least about 0.5 M to at least about 0.9 M salt for hybridization at 42° C., and at least about 0.1 M to at least about 0.2 M salt for washing at 55° C. Medium stringency conditions also may include 1% Bovine Serum Albumin (BSA), 1 mM EDTA, 0.5 M NaHPO₄ (pH 7.2), 7% SDS for hybridization at 65° C., and (i) 2×SSC, 0.1% SDS; or (ii) 0.5% BSA, 1 mM EDTA, 40 mM NaHPO₄ (pH 7.2), 5% SDS for washing at 60-65° C. One embodiment of medium stringency conditions includes hybridizing in 6×SSC at about 45° C., followed by one or more washes in 0.2×SSC, 0.1% SDS at 60° C.

[0396] “High stringency” conditions include and encompass from at least about 31% v/v to at least about 50% v/v formamide and from about 0.01 M to about 0.15 M salt for hybridization at 42° C., and about 0.01 M to about 0.02 M salt for washing at 55° C. High stringency conditions also may include 1% BSA, 1 mM EDTA, 0.5 M NaHPO₄ (pH 7.2), 7% SDS for hybridization at 65° C., and (i) 0.2×SSC, 0.1% SDS; or (ii) 0.5% BSA, 1 mM EDTA, 40 mM NaHPO₄ (pH 7.2), 1% SDS for washing at a temperature in excess of 65° C. One embodiment of high stringency conditions includes hybridizing in 6×SSC at about 45° C., followed by one or more washes in 0.2×SSC, 0.1% SDS at 65° C.

[0397] In certain embodiments, a reference polypeptide or enzyme described herein is encoded by a polynucleotide that hybridizes to a disclosed nucleotide sequence under very high stringency conditions. One embodiment of very high stringency conditions includes hybridizing in 0.5 M sodium phosphate, 7% SDS at 65° C., followed by one or more washes in 0.2×SSC, 1% SDS at 65° C.

[0398] Other stringency conditions are well known in the art and the skilled artisan will recognize that various factors can be manipulated to optimize the specificity of the hybridization. Optimization of the stringency of the final washes can serve to ensure a high degree of hybridization. For detailed examples, see Ausubel et al., supra at pages 2.10.1 to 2.10.16 and Sambrook et al. (1989, supra) at sections 1.101 to 1.104.

[0399] While stringent washes are typically carried out at temperatures from about 42° C. to 68° C., one skilled in the art will appreciate that other temperatures may be suitable for stringent conditions. Maximum hybridization rate typically occurs at about 20° C. to 25° C. below the Tₘ for formation of a DNA-DNA hybrid. It is well known in the art that the Tₘ is the melting temperature, or temperature at which two complementary polynucleotide sequences dissociate. Methods for estimating Tₘ are well known in the art (see Ausubel et al., supra at page 2.10.8).

[0400] In general, the Tₘ of a perfectly matched duplex of DNA may be predicted as an approximation by the formula: Tₘ=81.5+16.6(log₁₀ M)+0.41(% G+C)−0.63 (% formamide)−(600/length) wherein: M is the concentration of Na⁺, preferably in the range of 0.01 molar to 0.4 molar; % G+C is the sum of guanosine and cytosine bases as a percentage of the total number of bases, within the range between 30% and 75% G+C; % formamide is the percent formamide concentration by volume; length is the number of base pairs in the DNA duplex. The Tₘ of a duplex DNA decreases by approximately 1° C. with every increase of 1% in the number of randomly mismatched base pairs. Washing is generally carried out at Tₘ-15° C. for high stringency, or Tₘ-30° C. for moderate stringency.

[0401] In one example of a hybridization procedure, a membrane (e.g., a nitrocellulose membrane or a nylon membrane) containing immobilized DNA is hybridized overnight at 42° C. in a hybridization buffer (50% deionized formamide, 5×SSC, 5× Reinhardt's solution (0.1% fecal, 0.1% polyvinylpyrollidone and 0.1% bovine serum albumin), 0.1% SDS and 200 mg/mL denatured salmon sperm DNA) containing a labeled probe. The membrane is then subjected to two sequential medium stringency washes (i.e., 2×SSC, 0.1% SDS for 15 min at 45° C., followed by 2×SSC, 0.1% SDS for 15 min at 50° C.), followed by two sequential higher stringency washes (i.e., 0.2×SSC, 0.1% SDS for 12 min at 55° C. followed by 0.2×SSC and 0.1% SDS solution for 12 min at 65-68° C.).

[0402] Polynucleotides and fusions thereof may be prepared, manipulated and/or expressed using any of a variety of well established techniques known and available in the art. For example, polynucleotide sequences which encode polypeptides of the invention, or fusion proteins or functional equivalents thereof, may be used in recombinant DNA molecules to direct expression of a triglyceride or lipid biosynthesis enzyme in appropriate host cells. Due to the inherent degeneracy of the genetic code, other DNA sequences that encode substantially the same or a functionally equivalent amino acid sequence may be produced and these sequences may be used to clone and express a given polypeptide.

[0403] As will be understood by those of skill in the art, it may be advantageous in some instances to produce polypeptide-encoding nucleotide sequences possessing non-naturally occurring codons. For example, codons preferred by a particular prokaryotic or eukaryotic host can be selected to increase the rate of protein expression or to produce a recombinant RNA transcript having desirable properties, such as a half-life which is longer than that of a transcript generated from the naturally occurring sequence. Such nucleotides are typically referred to as “codon-optimized.”

[0404] Moreover, the polynucleotide sequences described herein can be engineered using methods generally known in the art in order to alter polypeptide encoding sequences for a variety of reasons, including but not limited to, alterations which modify the cloning, processing, expression and/or activity of the gene product.

[0405] In order to express a desired polypeptide, a nucleotide sequence encoding the polypeptide, or a functional equivalent, may be inserted into appropriate expression vector, i.e., a vector that contains the necessary elements for the transcription and translation of the inserted coding sequence. Methods which are well known to those skilled in the art may be used to construct expression vectors containing sequences encoding a polypeptide of interest and appropriate transcriptional and translational control elements. These methods include in vitro recombinant DNA techniques, synthetic techniques, and in vivo genetic recombination. Such techniques are described in Sambrook et al., Molecular Cloning, A Laboratory Manual (1989), and Ausubel et al., Current Protocols in Molecular Biology (1989).

[0406] A variety of expression vector/host systems are known and may be utilized to contain and express polynucleotide sequences. In certain embodiments, the polynucleotides of the present disclosure may be introduced and expressed in Cyanobacterial systems. As such, the present disclosure contemplates the use of vector and plasmid systems having regulatory sequences (e.g., promoters and enhancers) that are suitable for use in various Cyanobacteria (see, e.g., Koksharova et al., Applied Microbiol Biotechnol 58:123-37, 2002). For example, the promiscuous RSF1010 plasmid provides autonomous replication in several Cyanobacteria of the genera Synechocystis and Synechococcus (see, e.g., Mermet-Bouvier et al., Curr Microbiol 26:323-327, 1993). As another example, the pFC1 expression vector is based on the promiscuous plasmid RSF1010. pFC1 harbors the lambda cl857 repressor-encoding gene and pR promoter, followed by the lambda cro ribosome-binding site and ATG translation initiation codon (see, e.g., Mermet-Bouvier et al., Curr Microbiol 28:145-148, 1994). The latter is located within the unique Ndel restriction site (CATATG) of pFC1 and can be exposed after cleavage with this enzyme for in-frame fusion with the protein-coding sequence to be expressed.

[0407] The “control elements” or “regulatory sequences” present in an expression vector (or employed separately) are those non-translated regions of the vector—enhancers, promoters, 5′ and 3′ untranslated regions—which interact with host cellular proteins to carry out transcription and translation. Such elements may vary in their strength and specificity. Depending on the vector system and host utilized, any number of suitable transcription and translation elements, including constitutive and inducible promoters, may be used. Generally, it is well-known that strong E. coli promoters work well in Cyanobacteria. Also, when cloning in Cyanobacterial systems, inducible promoters such as the hybrid lacZ promoter of the PBLUESCRIPT phagemid (Stratagene, La Jolla, Calif.) or PSPORT1 plasmid (Gibco BRL, Gaithersburg, Md.) and the like may be used. Other vectors containing IPTG inducible promoters, such as pAM1579 and pAM2991trc, may be utilized according to the present invention.

[0408] Certain embodiments may employ a temperature inducible system or temperature inducible regulatory sequences (e.g., promoters, enhancers, repressors). As one example, an operon with the bacterial phage left-ward promoter (P_{L}) and a temperature sensitive repressor gene CI857 may be employed to produce a temperature inducible system for producing fatty acids and/or triglycerides in Cyanobacteria (see, e.g., U.S. Pat. No. 6,306,639, herein incorporated by reference). It is believed that at a non-permissible temperature (low temperature, 30 degrees Celsius), the repressor binds to the operator sequence, and thus prevents RNA polymerase from initiating transcription at the P_{L} promoter. Therefore, the expression of encoded gene or genes is repressed. When the cell culture is transferred to a permissible temperature (37-42 degrees Celsius), the repressor cannot bind to the operator. Under these conditions, RNA polymerase can initiate the transcription of the encoded gene or genes.

[0409] In Cyanobacterial systems, a number of expression vectors or regulatory sequences may be selected depending upon the use intended for the expressed polypeptide. When large quantities are needed, vectors or regulatory sequences which direct high level expression of encoded proteins may be used. For example, overexpression of ACCase enzymes may be utilized to increase fatty acid biosynthesis. Such vectors include, but are not limited to, the multifunctional E. coli cloning and expression vectors such as BLUESCRIPT (Stratagene), in which the sequence encoding the polypeptide of interest may be ligated into the vector in frame with sequences for the amino-terminal Met and the subsequent 7 residues of β-galactosidase so that a hybrid protein is produced; pIN vectors (Van Heeke & Schuster, J. Biol. Chem. 264:5503 5509 (1989)); and the like. pGEX Vectors (Promega, Madison, Wis.) may also be used to express foreign polypeptides as fusion proteins with glutathione S-transferase (GST).

[0410] Certain embodiments may employ Cyanobacterial promoters or regulatory operons. In certain embodiments, a promoter may comprise an rbcLS operon of Synechococcus, as described, for example, in Ronen-Tarazi et al. (Plant Physiology 18:1461-1469, 1995), or a cpc operon of Synechocystis sp. strain PCC 6714, as described, for example, in Imashimizu et al. (J Bacteriol. 185:6477-80, 2003). In certain embodiments, the tRNApro gene from Synechococcus may also be utilized as a promoter, as described in Chungjatupornchai et al. (Curr Microbiol. 38:210-216, 1999). Certain embodiments may employ the nirA promoter from Synechococcus sp. strain PCC7942, which is repressed by ammonium and induced by nitrite (see, e.g., Maeda et al., J. Bacteriol. 180:4080-4088, 1998; and Qi et al., Applied and Environmental Microbiology 71:5678-5684, 2005). The efficiency of expression may be enhanced by the inclusion of enhancers which are appropriate for the particular Cyanobacterial cell system which is used, such as those described in the literature.

[0411] In certain embodiments, expression vectors or introduced promoters utilized to overexpress an exogenous or endogenous reference polypeptide, or fragment or variant thereof, comprise a weak promoter under non-inducible conditions, e.g., to avoid toxic effects of long-term overexpression of any of these polypeptides. One example of such a vector for use in Cyanobacteria is the pBAD vector system. Expression levels from any given promoter may be determined, e.g., by performing quantitative polymerase chain reaction (qPCR) to determine the amount of transcript or mRNA produced by a promoter, e.g., before and after induction. In certain instances, a weak promoter is defined as a promoter that has a basal level of expression of a gene or transcript of interest, in the absence of inducer, that is ≦2.0% of the expression level produced by the promoter of the rnpB gene in S. elongatus PCC7942. In other embodiments, a weak promoter is defined as a promoter that has a basal level of expression of a gene or transcript of interest, in the absence of inducer, that is ≦5.0% of the expression level produced by the promoter of the rnpB gene in S. elongatus PCC7942.

[0412] It will be apparent that further to their use in vectors, any of the regulatory elements described herein (e.g., promoters, enhancers, repressors, ribosome binding sites, transcription termination sites) may be introduced directly into the genome of a photosynthetic microorganism (e.g., Cyanobacterium), typically in a region surrounding (e.g., upstream or downstream of) an endogenous or naturally-occurring reference gene/polynucleotide sequence described herein, to regulate expression (e.g., facilitate overexpression) of that gene.

[0413] Specific initiation signals may also be used to achieve more efficient translation of sequences encoding a polypeptide of interest. Such signals include the ATG initiation codon and adjacent sequences. In cases where sequences encoding the polypeptide, its initiation codon, and upstream sequences are inserted into the appropriate expression vector, no additional transcriptional or translational control signals may be needed. However, in cases where only coding sequence, or a portion thereof, is inserted, exogenous translational control signals including the ATG initiation codon should be provided. Furthermore, the initiation codon should be in the correct reading frame to ensure translation of the entire insert. Exogenous translational elements and initiation codons may be of various origins, both natural and synthetic.

[0414] A variety of protocols for detecting and measuring the expression of polynucleotide-encoded products, using either polyclonal or monoclonal antibodies specific for the product are known in the art. Examples include enzyme-linked immunosorbent assay (ELISA), radioimmunoassay (RIA), and fluorescence activated cell sorting (FACS). These and other assays are described, among other places, in Hampton et al., Serological Methods, a Laboratory Manual (1990) and Maddox et al., J. Exp. Med. 158:1211-1216 (1983). The presence or expression levels of a desired polynucleotide may also be confirmed by PCR.

[0415] A wide variety of labels and conjugation techniques are known by those skilled in the art and may be used in various nucleic acid and amino acid assays. Means for producing labeled hybridization or PCR probes for detecting sequences related to polynucleotides include oligolabeling, nick translation, end-labeling or PCR amplification using a labeled nucleotide. Alternatively, the sequences, or any portions thereof may be cloned into a vector for the production of an mRNA probe. Such vectors are known in the art, are commercially available, and may be used to synthesize RNA probes in vitro by addition of an appropriate RNA polymerase such as T7, T3, or SP6 and labeled nucleotides. These procedures may be conducted using a variety of commercially available kits. Suitable reporter molecules or labels, which may be used include radionuclides, enzymes, fluorescent, chemiluminescent, or chromogenic agents as well as substrates, cofactors, inhibitors, magnetic particles, and the like.

[0416] Cyanobacterial host cells transformed with a polynucleotide sequence of interest may be cultured under conditions suitable for the expression and recovery of the protein from cell culture. The protein produced by a recombinant cell may be secreted or contained intracellularly depending on the sequence and/or the vector used. As will be understood by those of skill in the art, expression vectors containing polynucleotides of the disclosure may be designed to contain signal sequences which direct localization of the encoded polypeptide to a desired site within the cell. Other recombinant constructions may be used to join sequences encoding a polypeptide of interest to nucleotide sequence encoding a polypeptide domain which will direct secretion of the encoded protein.

[0417] Modified Photosynthetic Microorganisms

[0418] Certain embodiments relate to modified photosynthetic microorganisms, including Cyanobacteria, and methods of use thereof, wherein the modified photosynthetic microorganisms comprise one or more over-expressed, exogenous or introduced intracellular localization domain-DGAT fusion proteins, and a corresponding polynucleotide that encodes the same, where the DGAT fusion protein comprises a heterologous intracellular localization domain and a DGAT polypeptide, or variant or fragment thereof. In particular embodiments, the DGAT fusion protein is a membrane-targeting domain- or plasma membrane (PM)-targeting domain-DGAT fusion proteins. In some embodiments, the DGAT polypeptide variant or fragment retains at least 50% of one or more activities of the wild-type DGAT polypeptide.

[0419] In certain aspects, the DGAT-fusion protein-expressing photosynthetic microorganisms described herein can further comprise one or more introduced or overexpressed lipid biosynthesis proteins. Examples of lipid biosynthesis proteins include, without limitation, acyl carrier proteins (ACP), acyl ACP synthases (Aas), acyl-ACP reductases, alcohol dehydrogenases, aldehyde dehydrogenases, aldehyde decarbonylases, thioesterases (TES), acetyl coenzyme A carboxylases (ACCase), phosphatidic acid phosphatases (PAP; or phosphatidate phosphatases), triacylglycerol (TAG) hydrolases, fatty acyl-CoA synthetases, and lipases/phospholipases, including any combinations thereof.

[0420] Certain preferred combinations include modified photosynthetic microorganisms having an exogenous or overexpressed DGAT fusion protein described herein in combination with an exogenous or overexpressed ACP; a DGAT fusion protein in combination with an Aas; a DGAT fusion protein in combination with an ACP and an Aas; a DGAT fusion protein in combination with an ACP and a TES such as *TesA or a FatB; a DGAT fusion protein in combination with an Aas and a TES such as *TesA or a FatB; and/or a DGAT fusion protein in combination with an ACP, an Aas, and a TES.

[0421] Also included are combinations that incorporate one or more TAG hydrolases into a TAG-producing strain. For example, certain embodiments include modified photosynthetic microorganisms having a DGAT fusion protein described herein, an exogenous or overexpressed ACP, Aas, or both, in combination with an exogenous or over-expressed TAG hydrolase, and optionally a TES. Certain embodiments, however, may employ a DGAT fusion protein and an over-expressed or exogenous TAG hydrolase, and optionally a TES, such as TesA (or *TesA) or any one or more of the FatB sequences, with or without an ACP or Aas. Hence, these and related embodiments may be employed separately from those that require an ACP, an Aas, or both. For instance, certain embodiments may comprise a DGAT fusion protein and TAG hydrolase, and optionally a TES. Any one of these embodiments can be further combined with one or more additional lipid biosynthesis proteins, such as an ACCase, a PAP, a fatty acyl-CoA synthetase, and/or a PL such as PLC.

[0422] Certain combinations incorporate one or more fatty acyl-CoA synthetases (e.g., FadD) into a DGAT fusion protein-expressing photosynthetic microorganism. For instance, certain embodiments include modified photosynthetic microorganisms having an exogenous or overexpressed ACP, Aas, or both, in combination with a DGAT fusion protein and a fatty acyl-CoA synthetase, and optionally a TES and/or a TAG hydrolase. Certain embodiments, however, may employ a DGAT fusion protein and an over-expressed or exogenous a fatty acyl-CoA synthetase, and optionally a TES, such as TesA (or *TesA) or any one or more of the FatB sequences, with or without an ACP or Aas. Hence, these and related embodiments may be employed separately from those that require an ACP, Aas, or both. For instance, certain embodiments may comprise a DGAT fusion protein and a fatty acyl-CoA synthetase, and optionally a TES (e.g., TesA, FatB). Any one of these embodiments can be further combined with one or more additional lipid biosynthesis proteins, such as an ACCase, a PAP, a TAG hydrolase, and/or a PL such as PLC.

[0423] Any one of these embodiments can also be combined with one or more introduced or overexpressed polynucleotides encoding a protein involved in a glycogen breakdown pathway, and/or with a strain having reduced expression of glycogen biosynthesis or storage pathways (e.g., full or partial deletion of glucose-1-phosphate adenyltransferase (glgC) gene and/or a phosphoglucomutase (pgm) gene). For instance, a specific modified photosynthetic microorganism could comprise a DGAT fusion protein described herein, an exogenous or overexpressed ACP, Aas, DGAT and PAP, combined with a full or partial deletion of the glgC gene and/or the pgm gene.

[0424] Photosynthetic microorganisms of the present disclosure can also be modified to increase the production of fatty acids by introducing one or more exogenous polynucleotide sequences that encode one or more enzymes associated with fatty acid synthesis. In certain aspects, the exogenous polynucleotide sequence encodes an enzyme that comprises an acyl-CoA carboxylase (ACCase) activity, typically allowing increased ACCase expression, and, thus, increased intracellular ACCase activity. Increased intracellular ACCase activity contributes to the increased production of fatty acids because this enzyme catalyzes the “commitment step” of fatty acid synthesis. Similarly, in some aspects, modified photosynthetic microorganisms may comprise a DGAT fusion protein described herein in combination with an acyl-ACP reductase, for instance, to increase the production of fatty acids, a starting material for triglycerides, and thereby increase production of triglycerides.

[0425] Other combinations include, for example, a modified photosynthetic microorganism comprising a DGAT fusion protein described herein and one of the following: an exogenous or overexpressed ACP in combination with an exogenous or overexpressed ACCase; an Aas in combination with an ACCase; an ACP and an Aas in combination with an ACCase; an ACP in combination with a PAP; an Aas in combination with a PAP; an ACP and an Aas in combination with a PAP; an ACP in combination with a PL such as PLA, PLB, or PLC; an Aas in combination with a PL; and an ACP and an Aas in combination with a PL. Any one of these embodiments can be combined with each other (e.g., ACP, Aas, ACCase, and PAP), and/or further combined with an exogenous or overexpressed TES. Any one of these embodiments can also be combined with one or more introduced polynucleotides encoding a protein involved in a glycogen breakdown pathway, and/or with a strain having reduced expression of glycogen biosynthesis or storage pathways (e.g., full or partial deletion of glucose-1-phosphate adenyltransferase (glgC) gene and/or a phosphoglucomutase (pgm) gene).

[0426] Any one of the above embodiments can also be combined with a strain having reduced expression of an aldehyde decarbonylase. In certain embodiments, such as Cyanobacteria including S. elongatus PCC7942, orf1593 resides directly upstream of orf1594 (acyl-ACP reductase coding region) and encodes an aldehyde decarbonylase. According to one non-limiting theory, because the aldehyde decarbonylase encoded by orf1593 utilizes acyl aldehyde as a substrate for alkane production, reducing expression of this protein may further increase yields of free fatty acids by shunting acyl aldehydes (produced by acyl-ACP reductase) away from an alkane-producing pathway, and towards a fatty acid-producing and storage pathway. PCC7942_orf1593 orthologs can be found, for example, in Synechocystis sp. PCC6803 (encoded by orfsll0208), N. punctiforme PCC 73102, Thermosynechococcus elongatus BP-1, Synechococcus sp. Ja-3-3AB, P. marinus MIT9313, P. marinus NATL2A, and Synechococcus sp. RS 9117, the latter having at least two paralogs (RS 9117-1 and -2). Included are strains having mutations or full or partial deletions of one or more genes encoding these and other aldehyde decarbonylases, such as S. elongatus PCC7942 having a full or partial deletion of orf1593, and Synechocystis sp. PCC6803 having a full or partial deletion of orfsll0208). For instance, a specific modified photosynthetic microorganism could comprise an overexpressed acyl-ACP reductase, combined with a full or partial deletion of the glgC gene and/or the pgm gene, optionally combined with an overexpressed ACP, ACCase, DGAT/acyl-CoA synthetase, or all of the foregoing, and optionally combined with a full or partial deletion of a gene encoding an aldehyde decarbonylase (e.g., PCC7942_orf1593, PCC6803_orfsll0208).

[0427] Any one of these embodiments can also be combined with a strain having reduced expression of an acyl-ACP synthetase (Aas). Without wishing to be bound by any one theory, an endogenous aldehyde dehydrogenase is acting on the acyl-aldehydes generated by orf1594 and converting them to free fatty acids. The normal role of such a dehydrogenase might involve removing or otherwise dealing with damaged lipids. In this scenario, it is then likely that the Aas gene product recycles these free fatty acids by ligating them to ACP. Accordingly, reducing or eliminating expression of the Aas gene product might ultimately increase production of fatty acids, by reducing or preventing their transfer to ACP. Included are mutations and full or partial deletions of one or more Aas genes, such as the Aas gene of Synechococcus elongatus PCC 7942. As one example, a specific modified photosynthetic microorganism could comprise an overexpressed acyl-ACP reductase, combined with a full or partial deletion of the glgC gene and/or the pgm gene, optionally combined with an overexpressed ACP, ACCase, DGAT/acyl-CoA synthetase, or all of the foregoing, optionally combined with a full or partial deletion of a gene encoding an aldehyde decarbonylase (e.g., PCC7942_orf1593, PCC6803_orfsll0208), and optionally combined with a full or partial deletion of an Aas gene encoding an acyl-ACP synthetase.

[0428] Any one or more of these embodiments can also be combined with a strain having increased expression of an aldehyde dehydrogenase. One exemplary aldehyde dehydrogenase is encoded by orf0489 of Synechococcus elongatus PCC7942. Also included are homologs or paralogs thereof, functional equivalents thereof, and fragments or variants thereof. Functional equivalents can include aldehyde dehydrogenases with the ability to convert acyl aldehydes (e.g., nonyl-aldehyde) into fatty acids. In specific embodiments, the aldehyde dehydrogenase has the amino acid sequence of SEQ ID NO:103 (encoded by the polynucleotide sequence of SEQ ID NO:102), or an active fragment or variant of this sequence

[0429] Some modified photosynthetic microorganisms may comprise a DGAT fusion protein described herein and an introduced or overexpressed acyl-ACP reductase, to increase production of triglycerides; optionally in further combination with an introduced or overexpressed alcohol dehydrogenase, for instance, to produce wax esters relative to other lipids. Certain of these and related embodiments may be combined with reduced expression and/or activity of at least one endogenous aldehyde decarbonylase, endogenous aldehyde dehydrogenase, or both.

[0430] For instance, particular modified photosynthetic microorganisms may comprise a DGAT fusion protein described herein in combination with an overexpressed or introduced acyl-ACP reductase and an overexpressed or introduced alcohol dehydrogenase, and in further combination with at least one mutation (e.g., point mutation, insertion, full or partial deletion) that reduces the expression and/or activity of an endogenous aldehyde decarbonylase. Certain modified photosynthetic microorganisms may comprise a DGAT fusion protein in combination with an overexpressed or introduced acyl-ACP reductase and an overexpressed or introduced alcohol dehydrogenase, and in further combination with at least one mutation (e.g., point mutation, insertion, full or partial deletion) that reduces the expression and/or activity of an endogenous aldehyde dehydrogenase. Some embodiments may include modified photosynthetic microorganisms that comprises a DGAT fusion protein in combination with an overexpressed or introduced acyl-ACP reductase and an overexpressed or introduced alcohol dehydrogenase, in further combination with at least one mutation that reduces the expression and/or activity of an endogenous aldehyde dehydrogenase and at least one mutation that reduces the expression and/or activity of an endogenous aldehyde decarbonylase. In specific embodiments, for instance, where the modified photosynthetic microorganism is S. elongatus, the aldehyde dehydrogenase is encoded by orf0489 and the aldehyde decarbonylase is encoded by orf1593 of S. elongatus.

[0431] Other combinations include, for example, a modified photosynthetic microorganism comprising a DGAT fusion protein described herein and reduced glycogen accumulation, in combination with one more of an overexpressed ACP; an overexpressed acyl-ACP reductase in combination with an overexpressed ACP; an acyl-ACP reductase in combination with an ACCase; an acyl-ACP reductase in combination with an ACP and an ACCase; an overexpressed acyl-ACP reductase in combination with an overexpressed acyl-CoA synthetase (e.g., a membrane-targeting domain-DGAT fusion/acyl-CoA synthetase combination); an overexpressed acyl-ACP reductase with an overexpressed ACCase optionally in combination with an overexpressed acyl-CoA synthetase; and an overexpressed acyl-ACP reductase with an overexpressed ACP and ACCase, optionally in combination with an overexpressed acyl-CoA synthetase. Acyl-ACP reductase and DGAT-overexpressing strains, optionally in combination with an overexpressed acyl-CoA synthetase, typically produce increased triglycerides relative to DGAT-only overexpressing strains. Any one of these embodiments can be combined with one or more introduced polynucleotides encoding a protein involved in a glycogen breakdown pathway, and/or with a strain having reduced expression of glycogen biosynthesis or storage pathways (e.g., full or partial deletion of glucose-1-phosphate adenyltransferase (glgC) gene and/or a phosphoglucomutase (pgm) gene). The present disclosure contemplates the use of any type of polynucleotide encoding a protein or enzyme associated with glycogen breakdown, removal, and/or elimination, as long as the modified photosynthetic microorganism accumulates a reduced amount of glycogen as compared to the wild type photosynthetic microorganism.

[0432] Increased expression or overexpression can be achieved a variety of ways, for example, by introducing a polynucleotide into the microorganism, modifying an endogenous gene to overexpress the polypeptide (e.g., by introducing an exogenous regulatory element such as a promoter), or both. For instance, one or more copies of an otherwise endogenous polynucleotide sequence can be introduced by recombinant techniques to increase expression, that is, to create additional copies of the otherwise endogenous polynucleotide sequence. Decreased expression and/or activity can also be achieved a variety of ways, described elsewhere herein and known in the art, including by mutation of coding and/or regulatory sequences of a gene of interest, and/or by RNA inhibition.

[0433] Modified photosynthetic microorganisms of the present disclosure may be produced using any type of photosynthetic microorganism. These include, but are not limited to photosynthetic bacteria, green algae, and cyanobacteria. The photosynthetic microorganism can be, for example, a naturally photosynthetic microorganism, such as a Cyanobacterium, or an engineered photosynthetic microorganism, such as an artificially photosynthetic bacterium. Exemplary microorganisms that are either naturally photosynthetic or can be engineered to be photosynthetic include, but are not limited to, bacteria; fungi; archaea; protists; eukaryotes, such as a green algae; and animals such as plankton, planarian, and amoeba. Examples of naturally occurring photosynthetic microorganisms include, but are not limited to, Spirulina maximum, Spirulina platensis, Dunaliella saline, Botrycoccus braunii, Chlorella vulgaris, Chlorella pyrenoidosa, Serenastrum capricomutum, Scenedesmus auadricauda, Porphyridium cruentum, Scenedesmus acutus, Dunaliella sp., Scenedesmus obliquus, Anabaenopsis, Aulosira, Cylindrospermum, Synechococcus sp., Synechocystis sp., and/or Tolypothrix.

[0434] A modified Cyanobacteria of the present disclosure may be from any genera or species of Cyanobacteria that is genetically manipulable, i.e., permissible to the introduction and expression of exogenous genetic material. Examples of Cyanobacteria that can be engineered according to the methods of the present disclosure include, but are not limited to, the genus Synechocystis, Synechococcus, Thermosynechococcus, Nostoc, Prochlorococcu, Microcystis, Anabaena, Spirulina, and Gloeobacter.

[0435] Cyanobacteria, also known as blue-green algae, blue-green bacteria, or Cyanophyta, is a phylum of bacteria that obtain their energy through photosynthesis. Cyanobacteria can produce metabolites, such as carbohydrates, proteins, lipids and nucleic acids, from CO₂, water, inorganic salts and light. Any Cyanobacteria may be used according to the present invention.

[0436] Cyanobacteria include both unicellular and colonial species. Colonies may form filaments, sheets or even hollow balls. Some filamentous colonies show the ability to differentiate into several different cell types, such as vegetative cells, the normal, photosynthetic cells that are formed under favorable growing conditions; akinetes, the climate-resistant spores that may form when environmental conditions become harsh; and thick-walled heterocysts, which contain the enzyme nitrogenase, vital for nitrogen fixation.

[0437] Heterocysts may also form under the appropriate environmental conditions (e.g., anoxic) whenever nitrogen is necessary. Heterocyst-forming species are specialized for nitrogen fixation and are able to fix nitrogen gas, which cannot be used by plants, into ammonia (NH₃), nitrites (NO₂⁻), or nitrates (NO₃⁻), which can be absorbed by plants and converted to protein and nucleic acids.

[0438] Many Cyanobacteria also form motile filaments, called hormogonia, which travel away from the main biomass to bud and form new colonies elsewhere. The cells in a hormogonium are often thinner than in the vegetative state, and the cells on either end of the motile chain may be tapered. In order to break away from the parent colony, a hormogonium often must tear apart a weaker cell in a filament, called a necridium.

[0439] Each individual Cyanobacterial cell typically has a thick, gelatinous cell wall. Cyanobacteria differ from other gram-negative bacteria in that the quorum sensing molecules autoinducer-2 and acyl-homoserine lactones are absent. They lack flagella, but hormogonia and some unicellular species may move about by gliding along surfaces. In water columns, some Cyanobacteria float by forming gas vesicles, like in archaea.

[0440] Cyanobacteria have an elaborate and highly organized system of internal membranes that function in photosynthesis. Photosynthesis in Cyanobacteria generally uses water as an electron donor and produces oxygen as a by-product, though some Cyanobacteria may also use hydrogen sulfide, similar to other photosynthetic bacteria. Carbon dioxide is reduced to form carbohydrates via the Calvin cycle. In most forms, the photosynthetic machinery is embedded into folds of the cell membrane, called thylakoids. Due to their ability to fix nitrogen in aerobic conditions, Cyanobacteria are often found as symbionts with a number of other groups of organisms such as fungi (e.g., lichens), corals, pteridophytes (e.g., Azolla), and angiosperms (e.g., Gunnera), among others.

[0441] Cyanobacteria are the only group of organisms that are able to reduce nitrogen and carbon in aerobic conditions. The water-oxidizing photosynthesis is accomplished by coupling the activity of photosystem (PS) II and I (Z-scheme). In anaerobic conditions, Cyanobacteria are also able to use only PS I (i.e., cyclic photophosphorylation) with electron donors other than water (e.g., hydrogen sulfide, thiosulphate, or molecular hydrogen), similar to purple photosynthetic bacteria. Furthermore, Cyanobacteria share an archaeal property; the ability to reduce elemental sulfur by anaerobic respiration in the dark. The Cyanobacterial photosynthetic electron transport system shares the same compartment as the components of respiratory electron transport. Typically, the plasma membrane contains only components of the respiratory chain, while the thylakoid membrane hosts both respiratory and photosynthetic electron transport.

[0442] Phycobilisomes, attached to the thylakoid membrane, act as light harvesting proteins for the photosystems of Cyanobacteria. The phycobilisome components (phycobiliproteins) are responsible for the blue-green pigmentation of most Cyanobacteria. Color variations are mainly due to carotenoids and phycoerythrins, which may provide the cells with a red-brownish coloration. In some Cyanobacteria, the color of light influences the composition of phycobilisomes. In green light, the cells accumulate more phycoerythrin, whereas in red light they produce more phycocyanin. Thus, the bacteria appear green in red light and red in green light. This process is known as complementary chromatic adaptation and represents a way for the cells to maximize the use of available light for photosynthesis.

[0443] In particular embodiments, the Cyanobacteria may be, e.g., a marine form of Cyanobacteria or a fresh water form of Cyanobacteria. Examples of marine forms of Cyanobacteria include, but are not limited to Synechococcus WH8102, Synechococcus RCC307, Synechococcus NKBG 15041c, and Trichodesmium. Examples of fresh water forms of Cyanobacteria include, but are not limited to, S. elongatus PCC 7942, Synechocystis PCC 6803, Plectonema boryanum, and Anabaena sp. Exogenous genetic material encoding the desired enzymes or polypeptides may be introduced either transiently, such as in certain self-replicating vectors, or stably, such as by integration (e.g., recombination) into the Cyanobacterium's native genome.

[0444] In other embodiments, a genetically modified Cyanobacteria of the present disclosure may be capable of growing in brackish or salt water. When using a fresh water form of Cyanobacteria, the overall net cost for production of triglycerides will depend on both the nutrients required to grow the culture and the price for freshwater. One can foresee freshwater being a limited resource in the future, and in that case it would be more cost effective to find an alternative to freshwater. Two such alternatives include: (1) the use of waste water from treatment plants; and (2) the use of salt or brackish water.

[0445] Salt water in the oceans can range in salinity between 3.1% and 3.8%, the average being 3.5%, and this is mostly, but not entirely, made up of sodium chloride (NaCl) ions. Brackish water, on the other hand, has more salinity than freshwater, but not as much as seawater. Brackish water contains between about 0.5% and 3% salinity, and thus includes a large range of salinity regimes and is therefore not precisely defined. Waste water is any water that has undergone human influence. It consists of liquid waste released from domestic and commercial properties, industry, and/or agriculture and can encompass a wide range of possible contaminants at varying concentrations.

[0446] There is a broad distribution of Cyanobacteria in the oceans, with Synechococcus filling just one niche. Specifically, Synechococcus sp. PCC 7002 (formerly known as Agmenellum quadruplicatum strain PR-6) grows in brackish water, is unicellular and has an optimal growing temperature of 38° C. While this strain is well suited to grow in conditions of high salt, it will grow slowly in freshwater. In particular embodiments, the present disclosure contemplates the use of a Cyanobacteria S. elongatus PCC 7942, altered in a way that allows for growth in either waste water or salt/brackish water. A S. elongatus PCC 7942 mutant resistant to sodium chloride stress has been described (Bagchi, S. N. et al., Photosynth Res. 2007, 92:87-101), and a genetically modified S. elongatus PCC 7942 tolerant of growth in salt water has been described (Waditee, R. et al., PNAS. 2002, 99:4109-4114). According to the present invention, a salt water tolerant strain is capable of growing in water or media having a salinity in the range of 0.5% to 4.0% salinity, although it is not necessarily capable of growing in all salinities encompassed by this range. In one embodiment, a salt tolerant strain is capable of growth in water or media having a salinity in the range of 1.0% to 2.0% salinity. In another embodiment, a salt water tolerant strain is capable of growth in water or media having a salinity in the range of 2.0% to 3.0% salinity.

[0447] Examples of Cyanobacteria that may be utilized and/or genetically modified according to the methods described herein include, but are not limited to, Chroococcales Cyanobacteria from the genera Aphanocapsa, Aphanothece, Chamaesiphon, Chroococcus, Chroogloeocystis, Coelosphaerium, Crocosphaera, Cyanobacterium, Cyanobium, Cyanodictyon, Cyanosarcina, Cyanothece, Dactylococcopsis, Gloecapsa, Gloeothece, Merismopedia, Microcystis, Radiocystis, Rhabdoderma, Snowella, Synychococcus, Synechocystis, Thermosenechococcus, and Woronichinia; Nostacales Cyanobacteria from the genera Anabaena, Anabaenopsis, Aphanizomenon, Aulosira, Calothrix, Coleodesmium, Cyanospira, Cylindrospermosis, Cylindrospermum, Fremyella, Gleotrichia, Microchaete, Nodularia, Nostoc, Rexia, Richelia, Scytonema, Sprirestis, and Toypothrix; Oscillatoriales Cyanobacteria from the genera Arthrospira, Geitlerinema, Halomicronema, Halospirulina, Katagnymene, Leptolyngbya, Limnothrix, Lyngbya, Microcoleus, Oscillatoria, Phormidium, Planktothricoides, Planktothrix, Plectonema, Pseudoanabaena/Limnothrix, Schizothrix, Spirulina, Symploca, Trichodesmium, Tychonema; Pleurocapsales cyanobacterium from the genera Chroococcidiopsis, Dermocarpa, Dermocarpella, Myxosarcina, Pleurocapsa, Stanieria, Xenococcus; Prochlorophytes Cyanobacterium from the genera Prochloron, Prochlorococcus, Prochlorothrix; and Stigonematales cyanobacterium from the genera Capsosira, Chlorogeoepsis, Fischerella, Hapalosiphon, Mastigocladopsis, Nostochopsis, Stigonema, Symphyonema, Symphonemopsis, Umezakia, and Westiellopsis. In certain embodiments, the Cyanobacterium is from the genus Synechococcus, including, but not limited to Synechococcus bigranulatus, Synechococcus elongatus, Synechococcus leopoliensis, Synechococcus lividus, Synechococcus nidulans, and Synechococcus rubescens.

[0448] In certain embodiments, the Cyanobacterium is Anabaena sp. strain PCC 7120, Synechocystis sp. strain PCC 6803, Nostoc muscorum, Nostoc ellipsosporum, or Nostoc sp. strain PCC 7120. In certain preferred embodiments, the Cyanobacterium is S. elongatus sp. strain PCC 7942.

[0449] Additional examples of Cyanobacteria that may be utilized in the methods provided herein include, but are not limited to, Synechococcus sp. strains WH7803, WH8102, WH8103 (typically genetically modified by conjugation), Baeocyte-forming Chroococcidiopsis spp. (typically modified by conjugation/electroporation), non-heterocyst-forming filamentous strains Planktothrix sp., Plectonema boryanum M101 (typically modified by electroporation), and Heterocyst-forming strains Anabaena sp. strains ATCC 29413 (typically modified by conjugation), Tolypothrix sp. strain PCC 7601 (typically modified by conjugation/electroporation) and Nostoc punctiforme strain ATCC 29133 (typically modified by conjugation/electroporation).

[0450] In certain preferred embodiments, the Cyanobacterium may be S. elongatus sp. strain PCC 7942 or Synechococcus sp. PCC 7002 (originally known as Agmenellum quadruplicatum).

[0451] In particular embodiments, the genetically modified, photosynthetic microorganism, e.g., Cyanobacteria, of the present disclosure may be used to produce triglycerides and/or other carbon-based products from just sunlight, water, air, and minimal nutrients, using routine culture techniques of any reasonably desired scale. In certain embodiments, the present disclosure contemplates using spontaneous mutants of photosynthetic microorganisms that demonstrate a growth advantage under a defined growth condition. Among other benefits, the ability to produce large amounts of triglycerides from minimal energy and nutrient input makes the modified photosynthetic microorganism, e.g., Cyanobacteria, of the present disclosure a readily manageable and efficient source of feedstock in the subsequent production of both biofuels, such as biodiesel, as well as specialty chemicals, such as glycerin.

### Methods of Producing Modified Photosynthetic Microorganisms

[0452] Embodiments of the present disclosure also include methods of producing the modified photosynthetic microorganisms (e.g., Cyanobacterium) described herein.

[0453] In certain embodiments, the present disclosure comprises methods of modifying a photosynthetic microorganism to produce a modified photosynthetic microorganism that produces an increased amount of lipids, e.g., triglycerides, relative to a corresponding wild type photosynthetic microorganism or a differently modified photosynthetic microorganism (e.g., one that expresses DGAT but not a form that selectively localizes to an intracellular region such as a membrane, including the plasma membrane), comprising introducing into the microorganism one or more polynucleotides encoding a intracellular localization domain-DGAT fusion protein described herein, including active fragments or variants thereof.

[0454] Also included are methods of modifying a photosynthetic microorganism to produce a modified photosynthetic microorganism that has improved cell growth characteristics, relative to a corresponding, DGAT-expressing modified photosynthetic microorganism where the DGAT does not have a heterologous intracellular localization domain (e.g., a wild-type DGAT), comprising introducing into the microorganism one or more polynucleotides encoding a intracellular localization domain-DGAT fusion protein described herein, including active fragments or variants thereof.

[0455] The methods may further comprise a step of selecting for photosynthetic microorganisms in which the one or more desired polynucleotides were successfully introduced, where the polynucleotides were, e.g., present in a vector that expressed a selectable marker, such as an antibiotic resistance gene. As one example, selection and isolation may include the use of antibiotic resistant markers known in the art (e.g., kanamycin, spectinomycin, and streptomycin).

[0456] In certain aspects, such photosynthetic microorganisms can be further modified by increasing the expression of one or more lipid biosynthesis proteins, for instance, by introducing an exogenous copy of a polynucleotide that encodes a lipid biosynthesis protein, by increasing expression of an endogenous lipid biosynthesis protein, or both. In some aspects, such photosynthetic microorganisms can be further modified by increasing the expression of one or more proteins associated with glycogen breakdown, for instance, by introducing an exogenous copy of a polynucleotide that encodes a glycogen breakdown protein, by increasing expression of an endogenous glycogen breakdown protein, or both.

[0457] Thus, in certain embodiments, the present disclosure includes methods of producing a modified photosynthetic microorganism, e.g., a Cyanobacteria, comprising: (1) introducing into the photosynthetic microorganism one or more polynucleotides encoding one or more intracellular localization domain-DGAT fusion proteins, and (2) introducing into the photosynthetic microorganism one or more operatively linked promoters (e.g., inducible or regulable promoters) into a region upstream of an endogenous lipid biosynthesis protein coding sequence, and/or introducing one or more polynucleotides encoding a lipid biosynthesis protein, or a fragment or variant thereof. Exemplary lipid biosynthesis proteins include any one or more of acyl carrier proteins (ACP), acyl ACP synthetases (Aas), acyl-ACP reductases, alcohol dehydrogenases, aldehyde dehydrogenases, aldehyde decarbonylases, thioesterases (TES), acetyl coenzyme A carboxylases (ACCase), phosphatidic acid phosphatases (PAP; or phosphatidate phosphatases), triacylglycerol (TAG) hydrolases, fatty acyl-CoA synthetases, and lipases/phospholipases, including any combination thereof.

[0458] Certain embodiments include methods of producing a modified photosynthetic microorganism, e.g., a Cyanobacteria, comprising: (1) introducing into the photosynthetic microorganism one or more polynucleotides encoding one or more intracellular localization domain-DGAT fusion proteins, and (2) introducing into the photosynthetic microorganism one or more operatively linked promoters (e.g., inducible or regulable promoters) into a region upstream of an endogenous glycogen breakdown protein coding sequence, and/or introducing one or more polynucleotides encoding a glycogen breakdown protein, or a fragment or variant thereof. Exemplary glycogen breakdown proteins include any one or more of glycogen phosphorylase (GlgP), glycogen isoamylase (GlgX), glucanotransferase (MalQ), phosphoglucomutase (Pgm), glucokinase (Glk), and/or phosphoglucose isomerase (Pgi), including any combination thereof.

[0459] Particular embodiments include methods of producing a modified photosynthetic microorganism, e.g., a Cyanobacteria, comprising: (1) introducing into the photosynthetic microorganism one or more polynucleotides encoding one or more intracellular localization domain-DGAT fusion proteins, (2) introducing into the photosynthetic microorganism one or more operatively linked promoters (e.g., inducible or regulable promoters) into a region upstream of an endogenous lipid biosynthesis protein coding sequence, and/or introducing one or more polynucleotides encoding a lipid biosynthesis protein, or a fragment or variant thereof, and (3) introducing into the photosynthetic microorganism one or more operatively linked promoters (e.g., inducible or regulable promoters) into a region upstream of an endogenous glycogen breakdown protein coding sequence, and/or introducing one or more polynucleotides encoding a glycogen breakdown protein, or a fragment or variant thereof.

[0460] In particular embodiments, the lipid biosynthesis protein is an acyl carrier protein (ACP), an acyl-ACP synthetase (Aas), or both. For instance, certain embodiments include methods for producing a modified photosynthetic microorganism, e.g., a Cyanobacteria, comprising: (1) introducing into the photosynthetic microorganism one or more polynucleotides encoding one or more intracellular localization domain-DGAT fusion proteins, (2) introducing into the photosynthetic microorganism one or more operatively linked promoters (e.g., inducible or regulable promoters) into a region upstream of an endogenous ACP coding sequence, and/or introducing one or more polynucleotides encoding an ACP, or a fragment or variant thereof. These and related methods can further comprise (3) introducing into the photosynthetic microorganism one or more operatively linked promoters (e.g., inducible or regulable promoters) into a region upstream of an endogenous TES, ACCase, TAG hydrolase, fatty acyl CoA synthetase, PAP, and/or phospholipase coding sequence, and/or introducing one or more polynucleotides encoding TES, ACCase, TAG hydrolase, fatty acyl CoA synthetase, PAP, and/or phospholipase, or a fragment or variant thereof.

[0461] Some embodiments include methods for producing a modified photosynthetic microorganism, e.g., a Cyanobacteria, comprising: (1) introducing into the photosynthetic microorganism one or more polynucleotides encoding one or more intracellular localization domain-DGAT fusion proteins, (2) introducing into the photosynthetic microorganism one or more operatively linked promoters (e.g., inducible or regulable promoters) into a region upstream of an endogenous Aas coding sequence, and/or introducing one or more polynucleotides encoding an Aas polypeptide, or a fragment or variant thereof. These and related methods can further comprise (3) introducing into the photosynthetic microorganism one or more operatively linked promoters (e.g., inducible or regulable promoters) into a region upstream of an endogenous TES, ACCase, TAG hydrolase, fatty acyl CoA synthetase, PAP, and/or phospholipase coding sequence, and/or introducing one or more polynucleotides encoding TES, ACCase, TAG hydrolase, fatty acyl CoA synthetase, PAP, and/or phospholipase, or a fragment or variant thereof.

[0462] Certain embodiments include methods of producing a modified photosynthetic microorganism, e.g., a Cyanobacteria, comprising: (1) introducing into the photosynthetic microorganism one or more polynucleotides encoding one or more intracellular localization domain-DGAT fusion proteins, (2) introducing into the photosynthetic microorganism one or more operatively linked promoters (e.g., inducible or regulable promoters) into a region upstream of an endogenous ACP coding sequence, and/or introducing one or more polynucleotides encoding an ACP, or a fragment or variant thereof, and (3) introducing into the photosynthetic microorganism one or more operatively linked promoters (e.g., inducible or regulable promoters) into a region upstream of an endogenous Aas coding sequence, and/or introducing one or more polynucleotides encoding an Aas polypeptide, or a fragment or variant thereof. These and related methods can further comprise (4) introducing into the photosynthetic microorganism one or more operatively linked promoters (e.g., inducible or regulable promoters) into a region upstream of an endogenous TES, ACCase, TAG hydrolase, fatty acyl CoA synthetase, PAP, and/or phospholipase coding sequence, and/or introducing one or more polynucleotides encoding TES, ACCase, TAG hydrolase, fatty acyl CoA synthetase, PAP, and/or phospholipase, or a fragment or variant thereof.

[0463] In some embodiments, the lipid biosynthesis protein is an acyl-ACP reductase, optionally in combination with an overexpressed alcohol dehydrogenase, for instance, to increase production of triglycerides and/or produce wax esters. Certain embodiments thus include methods of producing a modified photosynthetic microorganism, e.g., a Cyanobacteria, comprising: (1) introducing into the photosynthetic microorganism one or more polynucleotides encoding one or more intracellular localization domain-DGAT fusion proteins, and (2) introducing into the photosynthetic microorganism one or more operatively linked promoters (e.g., inducible or regulable promoters) into a region upstream of an endogenous acyl-ACP reductase coding sequence, and/or introducing one or more polynucleotides encoding an acyl-ACP reductase, or a fragment or variant thereof.

[0464] For wax ester production, also included are methods of producing a modified photosynthetic microorganism, e.g., a Cyanobacteria, comprising: (1) introducing into the photosynthetic microorganism one or more polynucleotides encoding one or more intracellular localization domain-DGAT fusion proteins, (2) introducing into the photosynthetic microorganism one or more operatively linked promoters (e.g., inducible or regulable promoters) into a region upstream of an endogenous acyl-ACP reductase coding sequence, and/or introducing one or more polynucleotides encoding an acyl-ACP reductase, or a fragment or variant thereof, and (3) introducing into the photosynthetic microorganism one or more operatively linked promoters (e.g., inducible or regulable promoters) into a region upstream of an endogenous alcohol dehydrogenase coding sequence, and/or introducing one or more polynucleotides encoding an alcohol dehydrogenase, or a fragment or variant thereof.

[0465] Any of the photosynthetic microorganisms described herein can be further modified by reducing expression and/or activity of one or more endogenous genes/proteins associated with glycogen synthesis and/or storage, one or more endogenous aldehyde dehydrogenases, one or more endogenous aldehyde decarbonylases, and/or one or more endogenous Aas polypeptides. Exemplary genes/proteins associated with glycogen synthesis and/or storage include glgA, glgC, and pgm.

[0466] In particular embodiments, expression or activity is reduced by knocking out or knocking down one or more alleles of the one or more genes. In particular embodiments, expression or activity of the one or more genes is reduced by contacting the photosynthetic microorganism with an antisense oligonucleotide or interfering RNA, e.g., an siRNA, that targets the one or more genes. In certain embodiments, a vector that expresses a polynucleotide that hybridizes to the one or more genes, e.g., an antisense oligonucleotide or an siRNA is introduced into the photosynthetic microorganism. Also included is the generation of mutants, such as point mutants, insertions, or full or partial deletions of a gene of interest and/or one or more of its regulatory elements (e.g., promoters, enhancers), to reduce expression and/or activity of a protein of interest. Natural selection or directed selection can also be used to identify naturally-occurring mutants having reduced expression and/or activity of a protein of interest.

[0467] For instance, particular embodiments include methods for producing a modified photosynthetic microorganism having reduced expression and/or activity of an aldehyde dehydrogenase, an aldehyde decarbonylase, or both. These and related embodiments may comprise (1) introducing into the photosynthetic microorganism one or more polynucleotides encoding one or more intracellular localization domain-DGAT fusion proteins, and (2) introducing one or more mutations into an endogenous gene encoding an aldehyde dehydrogenase, such as a point mutation, insertion, or full or partial deletion, which reduces expression and/or activity of the aldehyde dehydrogenase, e.g., renders the aldehyde dehydrogenase “non-functional,” as described herein. Also included are methods for producing a modified photosynthetic microorganism, comprising (1) introducing into the photosynthetic microorganism one or more polynucleotides encoding one or more intracellular localization domain-DGAT fusion proteins, and (2) introducing one or more mutations into an endogenous gene encoding an aldehyde decarbonylase, such as a point mutation, insertion, or full or partial deletion, which reduces expression and/or activity of the aldehyde decarbonylase.

[0468] Some embodiments include methods for producing a modified photosynthetic microorganism, comprising (1) introducing into the photosynthetic microorganism one or more polynucleotides encoding one or more intracellular localization domain-DGAT fusion proteins, (2) introducing one or more mutations into an endogenous gene encoding an aldehyde dehydrogenase, such as a point mutation, insertion, or full or partial deletion, which reduces expression and/or activity of the aldehyde dehydrogenase, and (3) introducing one or more mutations into an endogenous gene encoding an aldehyde decarbonylase, such as a point mutation, insertion, or full or partial deletion, which reduces expression and/or activity of the aldehyde decarbonylase.

[0469] Particular methods include producing a modified photosynthetic microorganism having increased expression of an acyl-ACP reductase and an alcohol dehydrogenase, in combination with reduced expression and/or activity of an aldehyde dehydrogenase, reduced expression and/or activity of an aldehyde decarbonylase, or both. These and related embodiments can be useful in the production of wax esters, as described herein. Some embodiments thus include methods for producing a modified photosynthetic microorganism, comprising (1) introducing into the photosynthetic microorganism one or more polynucleotides encoding one or more intracellular localization domain-DGAT fusion proteins, (2) introducing into the photosynthetic microorganism one or more operatively linked promoters (e.g., inducible or regulable promoters) into a region upstream of an endogenous acyl-ACP reductase coding sequence, and/or introducing one or more polynucleotides encoding an acyl-ACP reductase, or a fragment or variant thereof, (3) introducing into the photosynthetic microorganism one or more operatively linked promoters (e.g., inducible or regulable promoters) into a region upstream of an endogenous alcohol dehydrogenase coding sequence, and/or introducing one or more polynucleotides encoding an alcohol dehydrogenase, or a fragment or variant thereof, and either or both of (4) introducing one or more mutations into an endogenous gene encoding an aldehyde dehydrogenase, such as a point mutation, insertion, or full or partial deletion, which reduces expression and/or activity of the aldehyde dehydrogenase, and (5) introducing one or more mutations into an endogenous gene encoding an aldehyde decarbonylase, such as a point mutation, insertion, or full or partial deletion, which reduces expression and/or activity of the aldehyde decarbonylase. In certain embodiments, for instance, where the photosynthetic microorganism is S. elongatus, the aldehyde dehydrogenase is encoded by orf0489, and the aldehyde decarbonylase is encoded by orf1593.

[0470] Photosynthetic microorganisms, e.g., Cyanobacteria, may be genetically modified according to techniques known in the art, e.g., delete a portion or all of a gene or to introduce a polynucleotide that expresses a functional polypeptide. As noted above, in certain aspects, genetic manipulation in photosynthetic microorganisms, e.g., Cyanobacteria, can be performed by the introduction of non-replicating vectors which contain native photosynthetic microorganism sequences, exogenous genes of interest, and selectable markers or drug resistance genes. Upon introduction into the photosynthetic microorganism, the vectors may be integrated into the photosynthetic microorganism's genome through homologous recombination. In this way, an exogenous gene of interest and the drug resistance gene are stably integrated into the photosynthetic microorganism's genome. Such recombinants cells can then be isolated from non-recombinant cells by drug selection. Cell transformation methods and selectable markers for Cyanobacteria are also well known in the art (see, e.g., Wirth, Mol Gen Genet 216:175-7, 1989; and Koksharova, Appl Microbiol Biotechnol 58:123-37, 2002; and The Cyanobacteria: Molecular Biology, Genetics, and Evolution (eds. Antonio Herrera and Enrique Flores) Caister Academic Press, 2008, each of which is incorporated by reference for their description on gene transfer into Cyanobacteria, and other information on Cyanobacteria).

[0471] In certain embodiments, an endogenous version of a protein (e.g., ACP, Aas, TES, ACCase, TAG hydrolase, fatty acyl-CoA synthetase, PAP, PL), if present, can be overexpressed by introducing a heterologous or other promoter upstream of the endogenous gene encoding that protein, i.e., the naturally-occurring version of that gene. Such promoters may be constitutive or inducible.

[0472] Generation of deletions or mutations of any of the one or more genes associated with the biosynthesis or storage of glycogen can be accomplished according to a variety of methods known in the art, including the use of a non-replicating, selectable vector system that is targeted to the upstream and downstream flanking regions of a given gene (e.g., glgC, pgm), and which recombines with the Cyanobacterial genome at those flanking regions to replace the endogenous coding sequence with the vector sequence. Given the presence of a selectable marker in the vector sequence, such as a drug selectable marker, Cyanobacterial cells containing the gene deletion can be readily isolated, identified and characterized. Such selectable vector-based recombination methods need not be limited to targeting upstream and downstream flanking regions, but may also be targeted to internal sequences within a given gene, as long as that gene is rendered “non-functional,” as described herein.

[0473] The generation of deletions or mutations can also be accomplished using antisense-based technology. For instance, Cyanobacteria have been shown to contain natural regulatory events that rely on antisense regulation, such as a 177-nt ncRNA that is transcribed in antisense to the central portion of an iron-regulated transcript and blocks its accumulation through extensive base pairing (see, e.g., Dühring, et al., Proc. Natl. Acad. Sci. USA 103:7054-7058, 2006), as well as a alr1690 mRNA that overlaps with, and is complementary to, the complete furA gene, which acts as an antisense RNA (α-furA RNA) interfering with furA transcript translation (see, e.g., Hernandez et al., Journal of Molecular Biology 355:325-334, 2006). Thus, the incorporation of antisense molecules targeted to genes involved in glycogen biosynthesis or storage would be similarly expected to negatively regulate the expression of these genes, rendering them “non-functional,” as described herein.

[0474] As used herein, antisense molecules encompass both single and double-stranded polynucleotides comprising a strand having a sequence that is complementary to a target coding strand of a gene or mRNA. Thus, antisense molecules include both single-stranded antisense oligonucleotides and double-stranded siRNA molecules.

[0475] Other modifications described herein may be produced using standard procedures and reagents, e.g., vectors, available in the art. Related methods are described in PCT Application No. WO 2010/075440, which is hereby incorporated by reference in its entirety.

### Methods of Producing Lipids

[0476] The modified photosynthetic microorganisms and methods of the present disclosure may be used to produce lipids, such as fatty acids, triglycerides, and/or wax esters. Accordingly, the present disclosure provides methods of producing lipids, comprising culturing any of the modified photosynthetic microorganisms of the present disclosure (described elsewhere herein)

[0477] In one embodiment, the modified photosynthetic microorganism is a Cyanobacterium that produces or accumulates increased lipids relative to an unmodified or wild-type Cyanobacterium of the same species, or a differently modified Cyanobacterium of the same species. In certain embodiments, the modified photosynthetic microorganism is a Cyanobacterium that produces or accumulates increased triglycerides relative to an unmodified or wild-type Cyanobacterium of the same species, or a differently modified Cyanobacterium of the same species. In certain instances, the differently modified Cyanobacterium expresses a wild-type DGAT, and no other form(s) of DGAT. Other examples of differently modified Cyanobacteria are described herein. In certain aspects, increased triglyceride production is associated with improved cell growth characteristics relative to the differently modified Cyanobacterium, e.g., increased cell survival over time, and is thus measured over time, e.g., 2, 3, 4, 5, 6, 7, 8, 9, 10, 11, 12, 13, 14, or more days post-culture or post-induction of DGAT expression, or in a continuous culture system.

[0478] In one embodiment, the modified photosynthetic microorganism is a Cyanobacterium that produces or accumulates increased wax esters relative to an unmodified or wild-type Cyanobacterium of the same species, or a differently modified Cyanobacterium of the same species. In these and related embodiments, the Cyanobacterium overexpresses an acyl-ACP reductase and an alcohol dehydrogenase, in combination with an intracellular localization domain-DGAT fusion protein. In some embodiments, the differently modified Cyanobacterium is one that expresses DGAT in combination with an acyl-ACP reductase and an alcohol dehydrogenase, and thus produces wax esters, but expresses a wild-type DGAT and no other form of DGAT. In some aspects, increased wax ester production is associated with improved cell growth characteristics relative to the differently modified Cyanobacterium, e.g., increased cell survival over time, and is thus measured over time, e.g., 2, 3, 4, 5, 6, 7, 8, 9, 10, 11, 12, 13, 14, or more days post-culture or post-induction of DGAT expression, or in a continuous culture system.

[0479] In certain embodiments, the one or more introduced polynucleotides are present in one or more expression constructs. In particular embodiments, the one or more expression constructs comprises one or more inducible promoters. In certain embodiments, the one or more expression constructs are stably integrated into the genome of the modified photosynthetic microorganism.

[0480] In certain embodiments, the introduced polynucleotide encoding an introduced protein is present in an expression construct comprising a weak promoter under non-induced conditions. In certain embodiments, one or more of the introduced polynucleotides are codon-optimized for expression in a Cyanobacterium, e.g., a Synechococcus elongatus.

[0481] In particular embodiments, the photosynthetic microorganism is a Synechococcus elongatus, such as Synechococcus elongatus strain PCC7942 or a salt tolerant variant of Synechococcus elongatus strain PCC7942. In particular embodiments, the photosynthetic microorganism is a Synechococcus sp. PCC 7002 or a Synechocystis l sp. PCC6803.

[0482] Photosynthetic microorganisms may be cultured according to techniques known in the art. For example, Cyanobacteria may be cultured or cultivated according to techniques known in the art, such as those described in Acreman et al. (Journal of Industrial Microbiology and Biotechnology 13:193-194, 1994), in addition to photobioreactor based techniques, such as those described in Nedbal et al. (Biotechnol Bioeng. 100:902-10, 2008). One example of typical laboratory culture conditions for Cyanobacterium is growth in BG-11 medium (ATCC Medium 616) at 30° C. in a vented culture flask with constant agitation and constant illumination at 30-100 μmole photons m⁻² sec⁻¹.

[0483] A wide variety of mediums are available for culturing Cyanobacteria, including, for example, Aiba and Ogawa (AO) Medium, Allen and Arnon Medium plus Nitrate (ATCC Medium 1142), Antia's (ANT) Medium, Aquil Medium, Ashbey's Nitrogen-free Agar, ASN-III Medium, ASP 2 Medium, ASW Medium (Artificial Seawater and derivatives), ATCC Medium 617 (BG-11 for Marine Blue-Green Algae; Modified ATCC Medium 616 [BG-11 medium]), ATCC Medium 819 (Blue-green Nitrogen-fixing Medium; ATCC Medium 616 [BG-11 medium] without NO₃), ATCC Medium 854 (ATCC Medium 616 [BG-11 medium] with Vitamin B₁₂), ATCC Medium 1047 (ATCC Medium 957 [MN marine medium] with Vitamin B₁₂), ATCC Medium 1077 (Nitrogen-fixing marine medium; ATCC Medium 957 [MN marine medium] without NO₃), ATCC Medium 1234 (BG-11 Uracil medium; ATCC Medium 616 [BG-11 medium] with uracil), Beggiatoa Medium (ATCC Medium 138), Beggiatoa Medium 2 (ATCC Medium 1193), BG-11 Medium for Blue Green Algae (ATCC Medium 616), Blue-Green (BG) Medium, Bold's Basal (BB) Medium, Castenholtz D Medium, Castenholtz D Medium Modified (Halophilic cyanobacteria), Castenholtz DG Medium, Castenholtz DGN Medium, Castenholtz ND Medium, Chloroflexus Broth, Chloroflexus Medium (ATCC Medium 920), Chu's #10 Medium (ATCC Medium 341), Chu's #10 Medium Modified, Chu's #11 Medium Modified, DCM Medium, DYIV Medium, E27 Medium, E31 Medium and Derivatives, f/2 Medium, f/2 Medium Derivatives, Fraquil Medium (Freshwater Trace Metal-Buffered Medium), Gorham's Medium for Algae (ATCC Medium 625), h/2 Medium, Jaworski's (JM) Medium, K Medium, L1 Medium and Derivatives, MN Marine Medium (ATCC Medium 957), Plymouth Erdschreiber (PE) Medium, Prochlorococcus PC Medium, Proteose Peptone (PP) Medium, Prov Medium, Prov Medium Derivatives, S77 plus Vitamins Medium, S88 plus Vitamins Medium, Saltwater Nutrient Agar (SNA) Medium and Derivatives, SES Medium, SN Medium, Modified SN Medium, SNAX Medium, Soil/Water Biphasic (S/W) Medium and Derivatives, SOT Medium for Spirulina: ATCC Medium 1679, Spirulina (SP) Medium, van Rijn and Cohen (RC) Medium, Walsby's Medium, Yopp Medium, and Z8 Medium, among others.

[0484] In particular embodiments, the modified photosynthetic microorganisms are cultured under conditions suitable for inducing expression of the introduced polynucleotide(s), e.g., wherein the introduced polynucleotide(s) comprise an inducible promoter. Conditions and reagents suitable for inducing inducible promoters are known and available in the art. Also included are the use of auto-inductive systems, for example, where a metabolite represses expression of the introduced polynucleotide, and the use of that metabolite by the microorganism over time decreases its concentration and thus its repressive activities, thereby allowing increased expression of the polynucleotide sequence.

[0485] In certain embodiments, modified photosynthetic microorganisms, e.g., Cyanobacteria, are grown under conditions favorable for producing lipids, triglycerides and/or fatty acids. In particular embodiments, light intensity is between 100 and 2000 uE/m2/s, or between 200 and 1000 uE/m2/s. In particular embodiments, the pH range of culture media is between 7.0 and 10.0. In certain embodiments, CO₂ is injected into the culture apparatus to a level in the range of 1% to 10%. In particular embodiments, the range of CO₂ is between 2.5% and 5%. In certain embodiments, nutrient supplementation is performed during the linear phase of growth. Each of these conditions may be desirable for triglyceride production.

[0486] In certain embodiments, the modified photosynthetic microorganisms are cultured, at least for some time, under static growth conditions as opposed to shaking conditions. For example, the modified photosynthetic microorganisms may be cultured under static conditions prior to inducing expression of an introduced polynucleotide (e.g., intracellular localization domain-DGAT fusion, acyl-ACP reductase, ACP, Aas, ACP/Aas, glycogen breakdown protein, ACCase, DGAT, fatty acyl-CoA synthetase, aldehyde dehydrogenase, alcohol dehydrogenase) and/or the modified photosynthetic microorganism may be cultured under static conditions while expression of an introduced polynucleotide is being induced, or during a portion of the time period during which expression on an introduced polynucleotide is being induced. Static growth conditions may be defined, for example, as growth without shaking or growth wherein the cells are shaken at less than or equal to 30 rpm or less than or equal to 50 rpm.

[0487] In certain embodiments, the modified photosynthetic microorganisms are cultured, at least for some time, in media supplemented with varying amounts of bicarbonate. For example, the modified photosynthetic microorganisms may be cultured with bicarbonate at 5, 10, 20, 50, 75, 100, 200, 300, 400, 500, 600, 700, 800, 900, 1000 mM bicarbonate prior to inducing expression of an introduced polynucleotide (e.g., membrane-targeting domain-DGAT fusion protein, acyl-ACP reductase, aldehyde dehydrogenase, ACP, Aas, ACP/Aas, glycogen breakdown protein, ACCase, DGAT, fatty acyl-CoA synthetase, alcohol dehydrogenase) and/or the modified photosynthetic microorganism may be cultured with aforementioned bicarbonate concentrations while expression of an introduced polynucleotide is being induced, or during a portion of the time period during which expression on an introduced polynucleotide is being induced.

[0488] In related embodiments, modified photosynthetic organisms and methods of the present disclosure may be used in the production of a biofuel and/or a specialty chemical, such as glycerin or a wax ester. Thus, in particular embodiments, a method of producing a biofuel comprises culturing any of the modified photosynthetic microorganisms of the present disclosure under conditions wherein the modified photosynthetic microorganism accumulates an increased amount of total cellular lipid, fatty acid, wax ester, and/or triglyceride, as compared to a corresponding wild-type photosynthetic microorganism, obtaining cellular lipid, fatty acid, wax ester, and/or triglyceride from the microorganism, and processing the obtained cellular lipid, fatty acid, wax ester, and/or triglyceride to produce a biofuel. In another embodiment, a method of producing a biofuel comprises processing lipids, fatty acids, wax esters, and/or triglycerides produced by a modified photosynthetic microorganism of the present disclosure to produce a biofuel. In a further embodiment, a method of producing a biofuel comprises obtaining lipid, fatty acid, wax esters, and/or triglyceride produced by a modified photosynthetic microorganism of the present invention, and processing the obtained cellular lipid, fatty acid, wax ester, and/or triglyceride to produce a biofuel. In particular embodiments, the modified photosynthetic organism is grown under conditions wherein it has reduced growth but maintains photosynthesis.

[0489] Methods of processing lipids from microorganisms to produce a biofuel or specialty chemical, e.g., biodiesel, are known and available in the art. For example, triglycerides may be transesterified to produce biodiesel. Transesterification may be carried out by any one of the methods known in the art, such as alkali-, acid-, or lipase-catalysis (see, e.g., Singh et al., Recent Pat Biotechnol. 2008, 2(2):130-143). Various methods of transesterification utilize, for example, use of a batch reactor, a supercritical alcohol, an ultrasonic reactor, or microwave irradiation (Such methods are described, e.g., in Jeong and Park, Appl Biochem Biotechnol. 2006, 131(1-3):668-679; Fukuda et al., Journal of Bioscience and Engineering. 2001, 92(5):405-416; Shah and Gupta, Chemistry Central Journal. 2008, 2(1):1-9; and Carrillo-Munoz et al., J Org Chem. 1996, 61(22):7746-7749). The biodiesel may be further processed or purified, e.g., by distillation, and/or a biodiesel stabilizer may be added to the biodiesel, as described in U.S. Patent Application Publication No. 2008/0282606.

[0490] Certain embodiments of the present disclosure now will be illustrated by the following Examples. The present disclosure may, however, be embodied in many different forms and should not be construed as limited to the embodiments set forth herein; rather, these embodiments are provided so that this disclosure will be thorough and complete, and will fully convey the scope of the disclosure to those skilled in the art.

The application's sequence listing, which the Patent Office published only in electronic form, follows.

SEQUENCE LISTING (228 sequences)

SEQ ID NO: 1 - DNA, 1026 bp, Synechococcus elongatus
atgttcggtcttatcggtcatctcaccagtttggagcaggcccgcgacgtttctcgcaggatgggctacgacgaatacgccgatcaaggattggagttttggagtagcgctcctcctcaaatcgttgatgaaatcacagtcaccagtgccacaggcaaggtgattcacggtcgctacatcgaatcgtgtttcttgccggaaatgctggcggcgcgccgcttcaaaacagccacgcgcaaagttctcaatgccatgtcccatgcccaaaaacacggcatcgacatctcggccttggggggctttacctcgattattttcgagaatttcgatttggccagtttgcggcaagtgcgcgacactaccttggagtttgaacggttcaccaccggcaatactcacacggcctacgtaatctgtagacaggtggaagccgctgctaaaacgctgggcatcgacattacccaagcgacagtagcggttgtcggcgcgactggcgatatcggtagcgctgtctgccgctggctcgacctcaaactgggtgtcggtgatttgatcctgacggcgcgcaatcaggagcgtttggataacctgcaggctgaactcggccggggcaagattctgcccttggaagccgctctgccggaagctgactttatcgtgtgggtcgccagtatgcctcagggcgtagtgatcgacccagcaaccctgaagcaaccctgcgtcctaatcgacgggggctaccccaaaaacttgggcagcaaagtccaaggtgagggcatctatgtcctcaatggcggggtagttgaacattgcttcgacatcgactggcagatcatgtccgctgcagagatggcgcggcccgagcgccagatgtttgcctgctttgccgaggcgatgctcttggaatttgaaggctggcatactaacttctcctggggccgcaaccaaatcacgatcgagaagatggaagcgatcggtgaggcatcggtgcgccacggcttccaacccttggcattggcaatttga

SEQ ID NO: 2 - protein, 341 aa, Synechococcus elongatus
MFGLIGHLTSLEQARDVSRRMGYDEYADQGLEFWSSAPPQIVDEITVTSATGKVIHGRYIESCFLPEMLAARRFKTATRKVLNAMSHAQKHGIDISALGGFTSIIFENFDLASLRQVRDTTLEFERFTTGNTHTAYVICRQVEAAAKTLGIDITQATVAVVGATGDIGSAVCRWLDLKLGVGDLILTARNQERLDNLQAELGRGKILPLEAALPEADFIVWVASMPQGVVIDPATLKQPCVLIDGGYPKNLGSKVQGEGIYVLNGGVVEHCFDIDWQIMSAAEMARPERQMFACFAEAMLLEFEGWHTNFSWGRNQITIEKMEAIGEASVRHGFQPLALAI

SEQ ID NO: 3 - DNA, 1023 bp, Synechocystis sp.
atgtttggtcttattggtcatctcacgagtttagaacacgcccaagcggttgctgaagatttaggctatcctgagtacgccaaccaaggcctggatttttggtgttcggctcctccccaagtggttgataattttcaggtgaaaagtgtgacggggcaggtgattgaaggcaaatatgtggagtcttgctttttgccggaaatgttaacccaacggcggatcaaagcggccattcgtaaaatcctcaatgctatggccctggcccaaaaggtgggcttggatattacggccctgggaggcttttcttcaatcgtatttgaagaatttaacctcaagcaaaataatcaagtccgcaatgtggaactagattttcagcggttcaccactggtaatacccacaccgcttatgtgatctgccgtcaggtcgagtctggagctaaacagttgggtattgatctaagtcaggcaacggtagcggtttgtggcgccacgggagatattggtagcgccgtatgtcgttggttagatagcaaacatcaagttaaggaattattgctaattgcccgtaaccgccaaagattggaaaatctccaagaggaattgggtcggggcaaaattatggatttggaaacagccctgccccaggcagatattattgtttgggtggctagtatgcccaagggggtagaaattgcgggggaaatgctgaaaaagccctgtttgattgtggatgggggctatcccaagaatttagacaccagggtgaaagcggatggggtgcatattctcaagggggggattgtagaacattcccttgatattacctgggaaattatgaagattgtggagatggatattccctcccggcaaatgttcgcctgttttgcggaggccattttgctagagtttgagggctggcgcactaatttttcctggggccgcaaccaaatttccgttaataaaatggaggcgattggtgaagcttctgtcaagcatggcttttgccctttagtagctctttag

SEQ ID NO: 4 - protein, 340 aa, Synechocystis sp.
MFGLIGHLTSLEHAQAVAEDLGYPEYANQGLDFWCSAPPQVVDNFQVKSVTGQVIEGKYVESCFLPEMLTQRRIKAAIRKILNAMALAQKVGLDITALGGFSSIVFEEFNLKQNNQVRNVELDFQRFTTGNTHTAYVICRQVESGAKQLGIDLSQATVAVCGATGDIGSAVCRWLDSKHQVKELLLIARNRQRLENLQEELGRGKIMDLETALPQADIIVWVASMPKGVEIAGEMLKKPCLIVDGGYPKNLDTRVKADGVHILKGGIVEHSLDITWEIMKIVEMDIPSRQMFACFAEAILLEFEGWRTNFSWGRNQISVNKMEAIGEASVKHGFCPLVAL

SEQ ID NO: 5 - DNA, 243 bp, Synechococcus elongatus PCC 7942
atgagccaagaagacatcttcagcaaagtcaaagacattgtggctgagcagctgagtgtggatgtggctgaagtcaagccagaatccagcttccaaaacgatctgggagcggactcgctggacaccgtggaactggtgatggctctggaagaggctttcgatatcgaaatccccgatgaagccgctgaaggcattgcgaccgttcaagacgccgtcgatttcatcgctagcaaagctgcctag

SEQ ID NO: 6 - protein, 80 aa, Synechococcus elongatus PCC 7942
MSQEDIFSKVKDIVAEQLSVDVAEVKPESSFQNDLGADSLDTVELVMALEEAFDIEIPDEAAEGIATVQDAVDFIASKAA

SEQ ID NO: 7 - DNA, 261 bp, Acinetobacter sp. ADP1
atgtcgaacctggcggatgagatcaaacaaatgatcattgacgtcctcgctctcgaggatatccaaatccaggatattgatgaaacggcaccgctgttcggggatggtttgggcctggatagtattgacgcgctcgaactcggcctggccttgaaaaagcgctaccacatccatttgaatgccgaatctgacgaaactaagcagcactttcggtccattcagagcctggtgaccctggtggaggcccaacagaaagcttag

SEQ ID NO: 8 - protein, 86 aa, Acinetobacter sp. ADP1
MSNLADEIKQMIIDVLALEDIQIQDIDETAPLFGDGLGLDSIDALELGLALKKRYHIHLNAESDETKQHFRSIQSLVTLVEAQQKA

SEQ ID NO: 9 - DNA, 246 bp, Acinetobacter sp. ADP1
atgttgagtcaggaacacatcctctccacactccgcgaatggatggaggacttgtttgaaatcgagcctgaaaccattcaactggattctaacctgtactcggacctggatgtggatagcattgatgcggtcgatctgattgtcaagatcaaagagctcacgggcaaacaggtgaaaccggaagacttcaagaatgtccggactgtccatgatgttgtgaccgtgatccaaaacatgacggcttag

SEQ ID NO: 10 - protein, 81 aa, Acinetobacter sp. ADP1
MLSQEHILSTLREWMEDLFEIEPETIQLDSNLYSDLDVDSIDAVDLIVKIKELTGKQVKPEDFKNVRTVHDVVTVIQNMTA

SEQ ID NO: 11 - DNA, 345 bp, Acinetobacter sp. ADP1
atggtcgtctacacgtggccgaaatgtcgttgcattaactttcagaaaatccaatacagcatcaaactgacagcgatcaaaacgcctcgagcaatgcgccgcattcccgtgtctgatattgaacaacgggtgaagcaggccgtggcagaacagctcggcatcaaagccgaagaaatcaagaatgaggcttcgttcatggatgacttgggtgccgacagtctggatctcgtcgagctggtgatgagctttgagaatgattttgatatcaccattccggatgaagactcgaacgagatcactaccgttcaatccgcgattgactacgtgaccaagaagctgggttag

SEQ ID NO: 12 - protein, 114 aa, Acinetobacter sp. ADP1
MVVYTWPKCRCINFQKIQYSIKLTAIKTPRAMRRIPVSDIEQRVKQAVAEQLGIKAEEIKNEASFMDDLGADSLDLVELVMSFENDFDITIPDEDSNEITTVQSAIDYVTKKLG

SEQ ID NO: 13 - DNA, 246 bp, Spinacia oleracea
gcaaagaaggaaacaattgacaaagtgtgcgacattgtaaaggagaaactggctttaggagctgatgttgtggtcacagctgattccgagtttagtaaactcggtgctgattcattggacacggttgagatagtgatgaacctcgaggaagagttcggtatcaatgtggatgaagataaagctcaagatatatcaaccatccaacaagccgccgacgttattgagagtcttcttgagaagaaatag

SEQ ID NO: 14 - protein, 81 aa, Spinacia oleracea
AKKETIDKVCDIVKEKLALGADVVVTADSEFSKLGADSLDTVEIVMNLEEEFGINVDEDKAQDISTIQQAADVIESLLEKK

SEQ ID NO: 15 - protein, 7 aa, Artificial Sequence
  Heptapeptide retention motif
  VARIANT (3)..(3): Xaa = Any Amino Acid
FYXDWWN

SEQ ID NO: 16 - DNA, 1752 bp, Escherichia coli
atgttaacggcatgtatatcatttggggttgcgatgacgacgaacacgcattttagaggtgaagaattgaaaaaagtgtggctcaatcggtatccggcggatgtcccaactgaaatcaaccctgatcgatatcagtccctcgtggacatgtttgaacagagcgtggcacgctacgccgatcagcccgccttcgtgaatatgggcgaggttatgacgtttcggaaattggaagaacgctctcgggcgtttgcggcttatttgcagcagggcctgggcctgaagaaaggtgatcgggtcgccttgatgatgcccaacctcttgcaatacccggtcgccctgtttggaatcctgcgtgctggcatgattgtcgtgaatgtgaatcctctctacacccctcgtgaactcgaacaccagctgaacgatagtggcgcttccgctattgttatcgtgtctaatttcgctcatacgctggagaaggtcgtggacaagacagccgttcaacacgtcattctgacccgcatgggtgatcaactgagtacggcaaaaggtacggtcgtcaattttgtcgtcaaatatatcaaacgtctggtccccaagtaccatctgccagacgcgatttccttccggagtgctttgcataacggatatcgaatgcaatacgtgaaacccgaactggtgcctgaggacctcgcatttctgcagtacacaggtggcaccaccggggtggccaagggtgctatgctgacacatcgaaatatgctcgccaacctcgagcaggtcaacgccacctacggtccgctgttgcacccaggcaaggagctggttgtgacggctttgcccctgtatcatatttttgctctgacgatcaactgcctgctgtttattgagttgggtggtcagaacctcctgatcaccaatccacgcgatattccgggcctcgttaaagaactcgcgaaatacccctttactgcgatcacgggtgttaatactctctttaacgcgctgctcaacaataaggagttccaacagttggacttcagcagcctgcatctctctgccggcggtggcatgcctgtgcaacaagttgttgcggagcgatgggtgaaattgacggggcagtatctgttggaggggtacgggttgaccgaatgcgcacctctggtgtcggtgaacccctacgatattgactaccacagcggatcgatcggcctgccggtgccgtcgacagaagcgaaactggttgacgacgatgataacgaggtgcccccaggccaaccgggggagttgtgtgttaagggaccgcaagtcatgctcgggtactggcagcggccggatgccactgatgaaattatcaagaatggttggctccacaccggggacattgcagttatggatgaagagggattcctgcgcatcgtcgatcgcaaaaaagacatgatcctcgtgtccggctttaatgtctatccaaatgaaatcgaggatgtcgttatgcagcaccctggggtgcaggaggttgccgctgttggcgtgcctagcgggagtagcggcgaagcggtcaaaattttcgttgtcaagaaggaccccagtttgaccgaagagtcgttggtcacgttctgtcgccgccaactgactggatataaagtccccaaactcgtcgaatttcgggatgaattgcccaagtcgaacgtcggcaagatcctccgccgcgagttgcgcgatgaagcacgcggtaaggttgacaataaggcttag

SEQ ID NO: 17 - protein, 583 aa, Escherichia coli
MLTACISFGVAMTTNTHFRGEELKKVWLNRYPADVPTEINPDRYQSLVDMFEQSVARYADQPAFVNMGEVMTFRKLEERSRAFAAYLQQGLGLKKGDRVALMMPNLLQYPVALFGILRAGMIVVNVNPLYTPRELEHQLNDSGASAIVIVSNFAHTLEKVVDKTAVQHVILTRMGDQLSTAKGTVVNFVVKYIKRLVPKYHLPDAISFRSALHNGYRMQYVKPELVPEDLAFLQYTGGTTGVAKGAMLTHRNMLANLEQVNATYGPLLHPGKELVVTALPLYHIFALTINCLLFIELGGQNLLITNPRDIPGLVKELAKYPFTAITGVNTLFNALLNNKEFQQLDFSSLHLSAGGGMPVQQVVAERWVKLTGQYLLEGYGLTECAPLVSVNPYDIDYHSGSIGLPVPSTEAKLVDDDDNEVPPGQPGELCVKGPQVMLGYWQRPDATDEIIKNGWLHTGDIAVMDEEGFLRIVDRKKDMILVSGFNVYPNEIEDVVMQHPGVQEVAAVGVPSGSSGEAVKIFVVKKDPSLTEESLVTFCRRQLTGYKVPKLVEFRDELPKSNVGKILRRELRDEARGKVDNKA

SEQ ID NO: 18 - DNA, 2103 bp, Saccharomyces cerevisiae S288c
atggttgctcaatataccgttccagttgggaaagccgccaatgagcatgaaactgctccaagaagaaattatcaatgccgcgagaagccgctcgtcagaccgcctaacacaaagtgttccactgtttatgagtttgttctagagtgctttcagaagaacaaaaattcaaatgctatgggttggagggatgttaaggaaattcatgaagaatccaaatcggttatgaaaaaagttgatggcaaggagacttcagtggaaaagaaatggatgtattatgaactatcgcattatcattataattcatttgaccaattgaccgatatcatgcatgaaattggtcgtgggttggtgaaaataggattaaagcctaatgatgatgacaaattacatctttacgcagccacttctcacaagtggatgaagatgttcttaggagcgcagtctcaaggtattcctgtcgtcactgcctacgatactttgggagagaaagggctaattcattctttggtgcaaacggggtctaaggccatttttaccgataactctttattaccatccttgatcaaaccagtgcaagccgctcaagacgtaaaatacataattcatttcgattccatcagttctgaggacaggaggcaaagtggtaagatctatcaatctgctcatgatgccatcaacagaattaaagaagttagacctgatatcaagacctttagctttgacgacatcttgaagctaggtaaagaatcctgtaacgaaatcgatgttcatccacctggcaaggatgatctttgttgcatcatgtatacgtctggttctacaggtgagccaaagggtgttgtcttgaaacattcaaatgttgtcgcaggtgttggtggtgcaagtttgaatgttttgaagtttgtgggcaataccgaccgtgttatctgttttttgccactagctcatatttttgaattggttttcgaactattgtccttttattggggggcctgcattggttatgccaccgtaaaaactttaactagcagctctgtgagaaattgtcaaggtgatttgcaagaattcaagcccacaatcatggttggtgtcgccgctgtttgggaaacagtgagaaaagggatcttaaaccaaattgataatttgcccttcctcaccaagaaaatcttctggaccgcgtataataccaagttgaacatgcaacgtctccacatccctggtggcggcgccttaggaaacttggttttcaaaaaaatcagaactgccacaggtggccaattaagatatttgttaaacggtggttctccaatcagtcgggatgctcaggaattcatcacaaatttaatctgccctatgcttattggttacggtttaaccgagacatgcgctagtaccaccatcttggatcctgctaattttgaactcggcgtcgctggtgacctaacaggttgtgttaccgtcaaactagttgatgttgaagaattaggttattttgctaaaaacaaccaaggtgaagtttggatcacaggtgccaatgtcacgcctgaatattataagaatgaggaagaaacttctcaagctttaacaagcgatggttggttcaagaccggtgacatcggtgaatgggaagcaaatggccatttgaaaataattgacaggaagaaaaacttggtcaaaacaatgaacggtgaatatatcgcactcgagaaattagagtccgtttacagatctaacgaatatgttgctaacatttgtgtttatgccgaccaatctaagactaagccagttggtattattgtaccaaatcatgctccattaacgaagcttgctaaaaagttgggaattatggaacaaaaagacagttcaattaatatcgaaaattatttggaggatgcaaaattgattaaagctgtttattctgatcttttgaagacaggtaaagaccaaggtttggttggcattgaattactagcaggcatagtgttctttgacggcgaatggactccacaaaacggttttgttacgtccgctcagaaattgaaaagaaaagacattttgaatgctgtcaaagataaagttgacgccgtttatagttcgtcttaa

SEQ ID NO: 19 - protein, 700 aa, Saccharomyces cerevisiae S288c
MVAQYTVPVGKAANEHETAPRRNYQCREKPLVRPPNTKCSTVYEFVLECFQKNKNSNAMGWRDVKEIHEESKSVMKKVDGKETSVEKKWMYYELSHYHYNSFDQLTDIMHEIGRGLVKIGLKPNDDDKLHLYAATSHKWMKMFLGAQSQGIPVVTAYDTLGEKGLIHSLVQTGSKAIFTDNSLLPSLIKPVQAAQDVKYIIHFDSISSEDRRQSGKIYQSAHDAINRIKEVRPDIKTFSFDDILKLGKESCNEIDVHPPGKDDLCCIMYTSGSTGEPKGVVLKHSNVVAGVGGASLNVLKFVGNTDRVICFLPLAHIFELVFELLSFYWGACIGYATVKTLTSSSVRNCQGDLQEFKPTIMVGVAAVWETVRKGILNQIDNLPFLTKKIFWTAYNTKLNMQRLHIPGGGALGNLVFKKIRTATGGQLRYLLNGGSPISRDAQEFITNLICPMLIGYGLTETCASTTILDPANFELGVAGDLTGCVTVKLVDVEELGYFAKNNQGEVWITGANVTPEYYKNEEETSQALTSDGWFKTGDIGEWEANGHLKIIDRKKNLVKTMNGEYIALEKLESVYRSNEYVANICVYADQSKTKPVGIIVPNHAPLTKLAKKLGIMEQKDSSINIENYLEDAKLIKAVYSDLLKTGKDQGLVGIELLAGIVFFDGEWTPQNGFVTSAQKLKRKDILNAVKDKVDAVYSSS

SEQ ID NO: 20 - DNA, 2235 bp, Saccharomyces cerevisiae S288c
atggccgctccagattatgcacttaccgatttaattgaatcggatcctcgtttcgaaagtttgaagacaagattagccggttacaccaaaggctctgatgaatatattgaagagctatactctcaattaccactgaccagctatcccaggtacaaaacatttttaaagaaacaggcggttgccatttcgaatccggataatgaagctggttttagctcgatttataggagttctctttcttctgaaaatctagtgagctgtgtggataaaaacttaagaactgcatacgatcacttcatgttttctgcaaggagatggcctcaacgtgactgtttaggttcaaggccaattgataaagccacaggcacctgggaggaaacattccgtttcgagtcgtactccacggtatctaaaagatgtcataatatcggaagtggtatattgtctttggtaaacacgaaaaggaaacgtcctttggaagccaatgattttgttgttgctatcttatcacacaacaaccctgaatggatcctaacagatttggcctgtcaggcctattctctaactaacacggctttgtacgaaacattaggtccaaacacctccgagtacatattgaatttaaccgaggcccccattctgatttttgcaaaatcaaatatgtatcatgtattgaagatggtgcctgatatgaaatttgttaatactttggtttgtatggatgaattaactcatgacgagctccgtatgctaaatgaatcgttgctacccgttaagtgcaactctctcaatgaaaaaatcacatttttttcattggagcaggtagaacaagttggttgctttaacaaaattcctgcaattccacctaccccagattccttgtatactatttcgtttacttctggtactacaggtttacctaaaggtgtggaaatgtctcacagaaacattgcgtctgggatagcatttgctttttctaccttcagaataccgccagataaaagaaaccaacagttatatgatatgtgttttttgccattggctcatatttttgaaagaatggttattgcgtatgatctagccatcgggtttggaataggcttcttacataaaccagacccaactgtattggtagaggatttgaagattttgaaaccttacgcggttgccctggttcctagaatattaacacggtttgaagccggtataaaaaacgctttggataaatcgactgtccagaggaacgtagcaaatactatattggattctaaatcggccagatttaccgcaagaggtggtccagataaatcgattatgaattttctagtttatcatcgcgtattgattgataaaatcagagactctttaggtttgtccaataactcgtttataattaccggatcagctcccatatctaaagataccttactatttttaagaagtgccttggatattggtataagacagggctacggcttaactgaaacttttgctggtgtctgtttaagcgaaccgtttgaaaaagatgtcggatcttgtggtgccataggtatttctgcagaatgtagattgaagtctgttccagaaatgggttaccatgccgacaaggatttaaaaggtgaactgcaaattcgtggcccacaggtttttgaaagatattttaaaaatccgaatgaaacttcaaaagccgttgaccaagatggttggttttccacgggagatgttgcatttatcgatggaaaaggtcgcatcagcgtcattgatcgagtcaagaactttttcaagctagcacatggtgaatatattgctccagagaaaatcgaaaatatttatttatcatcatgcccctatatcacgcaaatatttgtctttggagatcctttaaagacatttttagttggcatcgttggtgttgatgttgatgcagcgcaaccgattttagctgcaaagcacccagaggtgaaaacgtggactaaggaagtgctagtagaaaacttaaatcgtaataaaaagctaaggaaggaatttttaaacaaaattaataaatgcaccgatgggctacaaggattcgaaaaattgcataacatcaaagtcggacttgagcctttaactctcgaggatgatgttgtgacgccaacttttaaaataaagcgtgccaaagcatcaaaattcttcaaagatacattagaccaactatacgccgaaggttcactagtcaagacagaaaagctttag

SEQ ID NO: 21 - protein, 744 aa, Saccharomyces cerevisiae S288c
MAAPDYALTDLIESDPRFESLKTRLAGYTKGSDEYIEELYSQLPLTSYPRYKTFLKKQAVAISNPDNEAGFSSIYRSSLSSENLVSCVDKNLRTAYDHFMFSARRWPQRDCLGSRPIDKATGTWEETFRFESYSTVSKRCHNIGSGILSLVNTKRKRPLEANDFVVAILSHNNPEWILTDLACQAYSLTNTALYETLGPNTSEYILNLTEAPILIFAKSNMYHVLKMVPDMKFVNTLVCMDELTHDELRMLNESLLPVKCNSLNEKITFFSLEQVEQVGCFNKIPAIPPTPDSLYTISFTSGTTGLPKGVEMSHRNIASGIAFAFSTFRIPPDKRNQQLYDMCFLPLAHIFERMVIAYDLAIGFGIGFLHKPDPTVLVEDLKILKPYAVALVPRILTRFEAGIKNALDKSTVQRNVANTILDSKSARFTARGGPDKSIMNFLVYHRVLIDKIRDSLGLSNNSFIITGSAPISKDTLLFLRSALDIGIRQGYGLTETFAGVCLSEPFEKDVGSCGAIGISAECRLKSVPEMGYHADKDLKGELQIRGPQVFERYFKNPNETSKAVDQDGWFSTGDVAFIDGKGRISVIDRVKNFFKLAHGEYIAPEKIENIYLSSCPYITQIFVFGDPLKTFLVGIVGVDVDAAQPILAAKHPEVKTWTKEVLVENLNRNKKLRKEFLNKINKCTDGLQGFEKLHNIKVGLEPLTLEDDVVTPTFKIKRAKASKFFKDTLDQLYAEGSLVKTEKL

SEQ ID NO: 22 - DNA, 2081 bp, Artificial Sequence
  S. cerevisiae FadD homolog (Faa3p)  - codon optimized
atgtctgaacaacactcggtggccgtcggtaaagccgctaacgaacatgaaactgccccccgacgtaacgtgcgcgtgaaaaaacgccccttgattcgccctctcaatagcagcgcgtcgacgttgtatgagtttgccctggaatgctttaacaaggggggcaaacgcgatggcatggcgtggcgagacgtcatcgagattcacgaaacgaagaagactatcgtgcgtaaggtcgacggaaaggataaaagcattgaaaagacctggctgtactacgaaatgagcccgtacaaaatgatgacgtatcaggaactcatttgggtgatgcatgatatgggtcgcgggctcgccaagattggcatcaagcccaacggtgaacacaaatttcatattttcgcgtcgacctcccacaaatggatgaaaatctttctcggctgcatctcgcaaggcattcctgtggtcaccgcttatgataccctcggcgaaagtggtctcattcattctatggtggaaacagagagtgctgctatctttacagataaccaattgctggcgaaaatgatcgtgcctctgcagtctgctaaagatatcaagtttctcattcacaacgagccaatcgaccccaatgatcgacgccagaatggaaaactctataaagctgctaaggacgcgatcaacaagattcgcgaggttcggcctgatatcaagatttactcgttcgaagaagtggttaaaatcggcaagaagagtaaagatgaagtgaaactgcatccgcccgaacccaaggatctcgcgtgtatcatgtacaccagtggatctatcagcgcgcccaaaggggtggtcctgacccattataatatcgtcagtgggattgcaggcgttgggcataacgtctttggctggatcggctccaccgatcgtgtcctgagctttttgcctctcgcacacattttcgaactcgtttttgaattcgaagcgttctactggaatggtattctgggatacggcagcgtgaaaaccttgacgaatacgagcacccgcaactgtaaaggtgatctggtggagtttaaaccgaccatcatgattggtgttgcggccgtttgggagacggtccgcaaagcgatcctggagaaaatcagtgatttgacaccggtgctgcagaagattttctggtcggcttacagcatgaaagagaaaagtgtgccatgcacgggatttttgtctcgtatggtctttaaaaaggttcgacaagctaccggtggtcacctcaagtatattatgaatggcggctccgctatctctattgacgcccaaaaattctttagtatcgtcttgtgcccgatgatcattggttatggcttgactgaaacagtggcaaacgcctgtgttctcgagccggaccattttgagtatggcatcgttggggacctggtggggtcggtcacggcaaaattggttgacgtgaaggatctggggtactatgccaaaaataatcagggggaactcctgttgaagggagcgcccgtctgcagcgaatactacaagaatccgattgagacagctgtgagcttcacatacgacggttggtttcgtaccggcgatatcgtcgagtggacgccaaagggtcagctcaaaattattgatcggcgcaagaacctggtcaagactttgaatggcgagtatattgcgctggaaaagctggagagcgtttaccgctcgaacagttacgtcaagaatatctgtgtgtacgccgatgagtcccgagtgaaacccgttggtattgtggtcccaaaccctggaccgctgtctaagtttgctgtcaagctgcgcattatgaagaagggggaagacattgagaattatattcacgataaggcgctccggaacgcagtgttcaaagagatgatcgccactgcaaaatcgcagggcctggtcggcattgagctgttgtgtggtatcgttttcttcgacgaggaatggactcccgaaaatggcttcgtgactagcgcccaaaagttgaaacggcgcgagattttggcagccgtcaaatccgaggttgaacgcgtctataaagaaaatag

SEQ ID NO: 23 - protein, 694 aa, Saccharomyces cerevisiae S288c
MSEQHSVAVGKAANEHETAPRRNVRVKKRPLIRPLNSSASTLYEFALECFNKGGKRDGMAWRDVIEIHETKKTIVRKVDGKDKSIEKTWLYYEMSPYKMMTYQELIWVMHDMGRGLAKIGIKPNGEHKFHIFASTSHKWMKIFLGCISQGIPVVTAYDTLGESGLIHSMVETESAAIFTDNQLLAKMIVPLQSAKDIKFLIHNEPIDPNDRRQNGKLYKAAKDAINKIREVRPDIKIYSFEEVVKIGKKSKDEVKLHPPEPKDLACIMYTSGSISAPKGVVLTHYNIVSGIAGVGHNVFGWIGSTDRVLSFLPLAHIFELVFEFEAFYWNGILGYGSVKTLTNTSTRNCKGDLVEFKPTIMIGVAAVWETVRKAILEKISDLTPVLQKIFWSAYSMKEKSVPCTGFLSRMVFKKVRQATGGHLKYIMNGGSAISIDAQKFFSIVLCPMIIGYGLTETVANACVLEPDHFEYGIVGDLVGSVTAKLVDVKDLGYYAKNNQGELLLKGAPVCSEYYKNPIETAVSFTYDGWFRTGDIVEWTPKGQLKIIDRRKNLVKTLNGEYIALEKLESVYRSNSYVKNICVYADESRVKPVGIVVPNPGPLSKFAVKLRIMKKGEDIENYIHDKALRNAVFKEMIATAKSQGLVGIELLCGIVFFDEEWTPENGFVTSAQKLKRREILAAVKSEVERVYKENS

SEQ ID NO: 24 - DNA, 1632 bp, Synechococcus elongatus PCC 7942
atgaatatccacactgtcgcgacgcaagcctttagcgaccaaaagcccggtacctccggcctgcgcaagcaagttcctgtcttccaaaaacggcactatctcgaaaactttgtccagtcgatcttcgatagccttgagggttatcagggccagacgttagtgctggggggtgatggccgctactacaatcgcacagccatccaaaccattctgaaaatggcggcggccaatggttggggccgcgttttagttggacaaggcggtattctctccacgccagcagtctccaacctaatccgccagaacggagccttcggcggcatcatcctctcggctagccacaacccagggggccctgagggcgatttcggcatcaagtacaacatcagcaacggtggccctgcacccgaaaaagtcaccgatgccatctatgcctgcagcctcaaaattgaggcctaccgcattctcgaagccggtgacgttgacctcgatcgactcggtagtcaacaactgggcgagatgaccgttgaggtgatcgactcggtcgccgactacagccgcttgatgcaatccctgtttgacttcgatcgcattcgcgatcgcctgaggggggggctacggattgcgatcgactcgatgcatgccgtcaccggtccctacgccaccacgatttttgagaaggagctaggcgcggcggcaggcactgtttttaatggcaagccgctggaagactttggcgggggtcacccagacccgaatttggtctacgcccacgacttggttgaactgttgtttggcgatcgcgccccagattttggcgcggcctccgatggcgatggcgatcgcaacatgatcttgggcaatcacttttttgtgacccctagcgacagcttggcgattctcgcagccaatgccagcctagtgccggcctaccgcaatggactgtctgggattgcgcgatccatgcccaccagtgcggcggccgatcgcgtcgcccaagccctcaacctgccctgctacgaaaccccaacgggttggaagtttttcggcaatctgctcgatgccgatcgcgtcaccctctgcggcgaagaaagctttggcacaggctccaaccatgtgcgcgagaaggatggcctgtgggccgtgctgttctggctgaatattctggcggtgcgcgagcaatccgtggccgaaattgtccaagaacactggcgcacctacggccgcaactactactctcgccacgactacgaaggggtggagagcgatcgagccagtacgctggtggacaaactgcgatcgcagctacccagcctgaccggacagaaactgggagcctacaccgttgcctacgccgacgacttccgctacgaagatccggtcgatggcagcatcagcgaacagcagggcattcgtattggctttgaagacggctcacgtatggtcttccgcttgtctggtactggtacggcaggagccaccctgcgcctctacctcgagcgcttcgaaggggacaccaccaaacagggtctcgatccccaagttgccctggcagatttgattgcaatcgccgatgaagtcgcccagatcacaaccttgacgggcttcgatcaaccgacagtgatcacctga

SEQ ID NO: 25 - DNA, 1704 bp, Synechocystis sp. PCC 6803
gtgtctaagcccctgatcgccgccctccattttttacaatttttgtatatgacaagcagaattaatcccctcgccggccagcatccccccgccgacagccttttggatgtggccaaacttttagacgactattaccgtcagcaaccggacccggaaaatcccgcccagttagtgagctttggtacctctggccatcggggttctgccctcaacggtacttttaatgaagcccatattttggcggtgacccaggcagtggtggactatcgccaagcccagggcattacggggcccctttatatggggatggatagccatgctctgtcggaaccagcccagaaaacggcgttggaagtgttggccgctaaccaagtagaaacttttttaaccaccgccacggatttaacccgtttcacccccactccggcggtatcctacgccattttgacccacaaccagggacgtaaagaaggtttagcggacggcattattattaccccttcccacaatccccccactgatggaggctttaaatataatcccccctccggtggcccggcggaaccggaagcgacccaatggattcagaaccgggccaatgagttgctgaaaaatggcaataaaacagttaaacggctggattacgagcaggcattaaaagccaccaccacccatgcccatgattttgtcactccctatgtggccggtctggcggacatcattgacttggatgtaattcgttcagcgggcttgcgcttgggagttgaccccctggggggagccaatgtgggctattgggaacccattgccgctaaatacaatttgaacatcagcttggttaatcccggggtagatcccacgtttaaatttatgaccctggattgggacggcaaaatccgcatggattgttcttccccctacgccatggccagtttggtgaaaatcaaagaccattacgacattgcctttggcaacgacaccgacggcgatcgccatggcattgtcacccccagcgtgggtttgatgaatcccaatcattttctttccgtggccatttggtatttgtttagtcagcggcaacagtggtcagggctgtcggcgatcggcaaaaccctagtcagcagcagcatgattgaccgggtgggggccatgattaatcgccaagtttacgaagtgcccgtgggctttaaatggtttgtcagcggtttgctagatggttcctttggctttgggggtgaagaaagtgccggggcttcgtttttgaaaaaaaatggcaccgtttggaccaccgacaaagatggcaccattatggatttattggcggcggaaatcaccgctaaaaccggcaaagatcccggcctccattaccaggatttgaccgctaagttaggtaatcccatttaccaacgcattgatgcccccgccactccggcccaaaaagaccgcttgaaaaaactgtcccccgatgacgttacagctacctccttagctggggatgccattactgctaaattaaccaaagcccctggcaaccaagcggcgatcggtgggttgaaggtgaccactgcggaaggttggtttgcggcccggccctccggcacggaaaatgtttacaaaatctatgccgaaagtttcaaagacgaagcccatctccaggctattttcacggaggcggaagccattgttacctcggctttgggctaa

SEQ ID NO: 26 - DNA, 1659 bp, Synechococcus sp. WH8102
atgaccacctcggcccccgcggaaccgaccctgcgcctggtgcgcctggacgcacctttcacggatcagaaacccggcacatccggtttgcgcaaaagcagccagcagttcgagcaagcgaactatctggagagctttgtggaagccgtattccgcaccttgcccggtgttcaagggggcacgctggtgttgggaggtgacggccgttacggcaaccgccgtgccatcgacgtgatcctgcgcatgggcgcggcccacggcctcagcaaggtgatcgtcaccaccggcggcatcctctccaccccggcggcctcgaacctgattcgccagcgtcaggccatcggcggcatcatcctctcggcaagccacaaccctggcggccccaatggagacttcggcgtcaaggtgaatggcgccaacggtggcccgaccccggcctcgttcaccgatgcggtgttcgagtgcaccaagaccttggagcaatacacgatcgttgatgccgcggccatcgccatcgatacccccggcagctacagcatcggcgccatgcaggtggaggtgatcgacggcgtcgacgacttcgtggctctgatgcaacagctgttcgactttgatcggatccgggagctgatccgcagcgacttcccgctggcgtttgatgcgatgcatgcggtcactggcccctacgccactcgcctgttggaagagatcctcggcgctcctgccggcagcgtccgcaacggcgttcctctggaggacttcggcggcggccaccccgaccccaacctcacctacgcccacgagctggccgaacttctgctcgacggggaggagttccgcttcggggccgcctgcgacggcgatggtgaccgcaacatgatcctggggcagcactgcttcgtaaaccccagcgacagcctggcggtgctcacagccaacgccacggtggcaccggcctatgccgatggtttggctggcgtggcccgctcgatgcccaccagctctgccgtggatgtggtggccaaggaactgggcatcgactgctacgagacccccaccggctggaagttcttcggcaatctgctggatgccggcaaaatcacgctctgcggtgaagagagcttcggcaccggcagcaaccacgtgcgtgaaaaggatggcctctgggctgttctgttctggctgcagatcctggccgagcgccgctgcagcgtcgccgagatcatggctgagcattggaagcgcttcggccgccactactactctcgccacgactacgaagccgtcgccagcgacgcagcccatgggctgttccaccgcctcgagggcatgctccctggtctggtggggcagagcttcgctggccgcagcgtcagcgcagccgacaacttcagctacaccgatcccgttgatggctctgtgaccaagggccagggcctgcgcatcctgctggaggatggcagccgcgtgatggtgcgcctctcgggcaccggcaccaagggcgccacgatccgcgtctatctggagagttatgtaccgagcagcggtgatctcaaccaggatccccaggtcgctctggccgacatgatcagcgccatcaatgaactggcggagatcaagcagcgcaccggcatggatcggcccaccgtgatcacctga

SEQ ID NO: 27 - DNA, 1293 bp, Synechococcus elongatus PCC 7942
gtgaaaaacgtgctggcgatcattctcggtggaggcgcaggcagtcgtctctatccactaaccaaacagcgcgccaaaccagcggtccccctggcgggcaaataccgcttgatcgatattcccgtcagcaattgcatcaacgctgacatcaacaaaatctatgtgctgacgcagtttaactctgcctcgctcaaccgccacctcagtcagacctacaacctctccagcggctttggcaatggctttgttgaggtgctagcagctcagattacgccggagaaccccaactggttccaaggcaccgccgatgcggttcgccagtatctctggctaatcaaagagtgggatgtggatgagtacctgatcctgtcgggggatcatctctaccgcatggactatagccagttcattcagcggcaccgagacaccaatgccgacatcacactctcggtcttgccgatcgatgaaaagcgcgcctctgattttggcctgatgaagctagatggcagcggccgggtggtcgagttcagcgaaaagcccaaaggggatgaactcagggcgatgcaagtcgataccacgatcctcgggcttgaccctgtcgctgctgctgcccagcccttcattgcctcgatgggcatctacgtcttcaagcgggatgttctgatcgatttgctcagccatcatcccgagcaaaccgactttggcaaggaagtgattcccgctgcagccacccgctacaacacccaagcctttctgttcaacgactactgggaagacatcggcacgatcgcctcattctacgaggccaatctggcgctgactcagcaacctagcccacccttcagcttctacgacgagcaggcgccgatttacacccgcgctcgctacctgccgccaaccaagctgctcgattgccaggtgacccagtcgatcattggcgagggctgcattctcaagcaatgcaccgttcagaattccgtcttagggattcgctcccgcattgaggccgactgcgtgatccaggacgccttgttgatgggcgctgacttctacgaaacctcggagctacggcaccagaatcgggccaatggcaaagtgccgatgggaatcggcagtggcagcaccatccgtcgcgccatcgtcgacaaaaatgcccacattggccagaacgttcagatcgtcaacaaagaccatgtggaagaggccgatcgcgaagatctgggctttatgatccgcagcggcattgtcgttgtggtcaaaggggcggttattcccgacaacacggtgatctaa

SEQ ID NO: 28 - DNA, 1320 bp, Synechocystis sp. PCC 6803
gtgtgttgttggcaatcgagaggtctgcttgtgaaacgtgtcttagcgattatcctgggcggtggggccgggacccgcctctatcctttaaccaaactcagagccaaacccgcagttcccttggccggaaagtatcgcctcatcgatattcccgtcagtaattgcatcaactcagaaatcgttaaaatttacgtccttacccagtttaattccgcctcccttaaccgtcacatcagccgggcctataatttttccggcttccaagaaggatttgtggaagtcctcgccgcccaacaaaccaaagataatcctgattggtttcagggcactgctgatgcggtacggcaatacctctggttgtttagggaatgggacgtagatgaatatcttattctgtccggcgaccatctctaccgcatggattacgcccaatttgttaaaagacaccgggaaaccaatgccgacataaccctttccgttgtgcccgtggatgacagaaaggcacccgagctgggcttaatgaaaatcgacgcccagggcagaattactgacttttctgaaaagccccagggggaagccctccgggccatgcaggtggacaccagcgttttgggcctaagtgcggagaaggctaagcttaatccttacattgcctccatgggcatttacgttttcaagaaggaagtattgcacaacctcctggaaaaatatgaaggggcaacggactttggcaaagaaatcattcctgattcagccagtgatcacaatctgcaagcctatctctttgatgactattgggaagacattggtaccattgaagccttctatgaggctaatttagccctgaccaaacaacctagtcccgactttagtttttataacgaaaaagcccccatctataccaggggtcgttatcttccccccaccaaaatgttgaattccaccgtgacggaatccatgatcggggaaggttgcatgattaagcaatgtcgcatccaccactcagttttaggcattcgcagtcgcattgaatctgattgcaccattgaggatactttggtgatgggcaatgatttctacgaatcttcatcagaacgagacaccctcaaagcccggggggaaattgccgctggcataggttccggcaccactatccgccgagccatcatcgacaaaaatgcccgcatcggcaaaaacgtcatgattgtcaacaaggaaaatgtccaggaggctaaccgggaagagttaggtttttacatccgcaatggcatcgtagtagtgattaaaaatgtcacgatcgccgacggcacggtaatctag

SEQ ID NO: 29 - DNA, 1290 bp, Synechococcus sp. PCC 7002
gtgaaacgagtcctaggaatcatacttggcggcggcgcaggtactcgcctatatccgctaacaaaactcagagctaagcccgcagtacctctagcaggcaaatatcgtctcattgatattcctgttagcaattgcattaattctgaaattcataaaatctacattttaacccaatttaattcagcatctttaaatcgtcacattagtcgaacctacaactttaccggcttcaccgaaggctttaccgaagtactcgcagcccaacaaactaaagaaaatcccgattggttccaaggcaccgccgacgctgtccgacagtacagttggcttctagaagactgggatgtcgatgaatacatcattctctccggtgatcacctctaccgtatggattaccgtgaatttatccagcgccaccgtgacactggggcagacatcaccctgtctgtggttcccgtgggcgaaaaagtagcccccgcctttgggttgatgaaaattgatgccaatggtcgtgtcgtggactttagtgaaaagcccactggtgaagcccttaaggcgatgcaggtggatacccagtccttgggtctcgatccagagcaggcgaaagaaaagccctacattgcgtcgatggggatctacgtctttaagaaacaagtactcctcgatctactcaaagaaggcaaagataaaaccgatttcgggaaagaaattattcctgatgcggccaaggactacaacgttcaggcctatctctttgatgattattgggctgacattgggaccatcgaagcgttctatgaagcaaaccttggcttgacgaagcagccgatcccaccctttagtttctatgacgaaaaggctcccatctacacccgggcgcgctacttaccgccgacgaaggtgctcaacgctgacgtgacagaatcgatgatcagcgaaggttgcatcattaaaaactgccgcattcaccactcagttcttggcattcgcacccgtgtcgaagcggactgcactatcgaagatacgatgatcatgggcgcagattattatcagccctatgagaagcgccaggattgtctccgtcgtggcaagcctcccattgggattggtgaagggacaacgattcgccgggcgatcatcgataaaaatgcacgcatcggtaaaaacgtgatgatcgtcaataaggaaaatgtggaggagtcaaaccgtgaggagcttggctactacattcgcagcggcattacagtggtgctaaagaacgccgttattcccgacggtacggtcatttaa

SEQ ID NO: 30 - DNA, 1296 bp, Synechococcus sp. WH8102
atgaagcgggttttggccatcattctcggcggcggtgccgggactcgtctctacccgctcaccaagatgcgcgccaagccggccgtccccttggccggtaagtatcgactgattgatatccccatcagcaactgcatcaactcgaacatcaacaagatgtacgtgatgacgcagttcaacagtgcgtctctcaatcgtcacctcagccagacgttcaacctgagcgcatccttcggtcagggattcgtcgaggtgcttgctgcccagcagacgcctgacagtccatcctggtttgaaggcactgccgacgctgtgcggaagtaccagtggctgttccaggaatgggatgtcgatgaatacctgatcctgtccggtgaccagctgtaccggatggattacagcctgttcgttgaacatcaccgcagcactggtgctgacctcaccgttgcagcccttcctgtggacccgaaacaggccgaggcgttcggcttgatgcgcacggatggtgacggagacatcaaggagttccgcgaaaagcccaagggtgattctttgcttgagatggcggttgacaccagccgatttggactcagtgcgaattcggccaaggagcgtccctacctggcgtcgatggggatttatgtcttcagcagagacactctgttcgacctgctcgattccaatcctggttataaggacttcggcaaggaagtcattcctgaggccctcaagcgtggcgacaagctgaagagctatgtctttgacgattattgggaagatatcggaacgatcggagcgttctacgaggccaacctggcgctcacccagcaacccacaccccccttcagcttctacgacgagaagttcccgatctacactcgtccccgctatttacccccgagcaaactggttgatgctcagatcaccaattcgatcgttggcgaaggctcaattttgaagtcatgcagcattcatcactgcgttttgggtgttcgcagtcgcattgaaaccgatgtggtgctgcaagacaccttggtgatgggcgctgacttctttgaatccagtgatgagcgtgccgtgcttcgcgagcgtggtggtattccggtcggggtgggccaaggtacgactgtgaagcgcgccatcctcgataaaaacgctcgcatcggatccaacgtcaccatcgtcaacaaggatcacgtcgaggaagctgatcgttccgatcagggcttctatattcgtaatggcattgttgttgttgtcaagaacgccaccatccaggacggaactgtgatctga

SEQ ID NO: 31 - DNA, 1296 bp, Synechococcus sp. RCC 307
atgaaacgggttctcgcaatcattctcggtggcggtgcgggtacgcggctctatccgctgaccaaaatgcgggccaaaccagccgtgccgctggcgggtaagtaccgcctcatcgacatccccgttagcaactgcatcaacagcgggatcaacaagatctatgtgctgacgcagttcaacagcgcatcactgaatcgccacatcgctcaaaccttcaacctctcctcggggtttgatcaagggtttgttgaagttctggcggcccagcagaccccagatagccccagttggtttgaaggaacagccgatgctgttcgtaaatacgaatggctgctgcaggagtgggacatcgacgaagtgctgatcctttcgggtgaccagctctaccggatggactatgcccattttgtggctcagcaccgcgccagcggcgctgacctcaccgtggccgccctcccggttgatcgcgagcaagcccagagctttggcttgatgcacaccggtgcagaagcctccatcaccaagttccgcgaaaagcccaaaggcgaggcactcgatgagatgtcctgcgataccgccagcatgggcttgagcgctgaggaagcccatcgccggccgttcctggcttccatgggcatctacgtgttcaagcgggacgtgctcttccgcttactggctgaaaaccccggtgccactgacttcggtaaggagatcatccccaaggcactcgacgatggcttcaaactccgctcctatctcttcgacgattactgggaagacatcggaaccatccgtgctttctatgaagcgaatctggcgctgacgacccagccgcgtccgcccttctctttctacgacaagcgtttcccgatctacacacgtcatcgctacctgccgccctccaagcttcaagatgcgcaggtcaccgactccattgttggtgaggggtccattttgaaggcttgcagtattcaccactgcgtcttgggtgtgcgcagccgcattgaagacgaggttgccttgcaagacaccctggtgatgggcaacgacttctatgagtccggcgaagagcgggccatcctgcgggaacgtggtggcatccccatgggtgtgggccgaggaaccacggtgaaaaaggccatcctcgataagaacgtccgcatcggcagcaacgtcagcatcatcaacaaagacaacgttgaggaagccgaccgcgctgagcagggcttctacatccgtggcgggattgtggtgatcaccaaaaacgcttcgattcccgacgggatggtgatctga

SEQ ID NO: 32 - DNA, 1287 bp, Trichodesmium erythraeum IMS 101
gtgaaaaacgtactaagtataattctaggcggtggcgcaggtacccgtttatatcccttaacaaaactacgggccaagcctgcagtgcccctagcaggaaaatatcgtttaatagatattcctataagtaattgcataaactcagaaatccagaaaatttatgttttgacccaatttaactcagcttctctaaaccgccatatcactcgtacctataacttctcaggtttcagtgatggttttgtcgaagttctagcagctcaacaaactaaagataatccagagtggtttcaaggaacagcagatgctgtccgtaaatatatatggttattcaaagagtgggatattgattattatctaattctctctggagaccatctctaccgtatggactaccgagactttgtccaacgccatatcgacaccaaggcagatatcaccctttctgtcttgcctattgatgaagcacgggcctccgagtttggcgtcatgaaaattgataactcaggtcgaattgttgaatttagtgaaaaaccgaaaggtaatgcccttaaagctatggcagttgatacttctattttaggagtcagtccagaaatagctacaaaacaaccttatattgcttctatgggaatttatgtatttaataaagatgcaatgatcaaacttatagaagattcagaggatacagattttggtaaggaaattttacccaagtcggctcaatcttataatcttcaagcctacccattccaaggttactgggaagacatcggaaccatcaaatcattttatgaagctaatttggctttgactcaacagcctcagccaccctttagcttttatgatgaacaagcccctatctatacccgctctcgttatttacctccgagcaaacttttggactgtgagattacagagtcaattgtgggagaaggttgtattcttaaaaaatgtcggattgaccattgtgtcttaggagtgcgatcgcgtatagaagctaattgtataattcaagattctctgctaatgggttcagatttctatgaatctcctacagaacgtcgatatggcctaaaaaaaggttctgtacctttgggtattggtgctgaaacgaaaattcgtggagcaattattgacaaaaatgcccgcattggttgtaatgtccaaataatcaataaggacaatgtagaagaagcccaacgtgaggaggaagggtttatcattcgcagtggtattgttgttgttttgaaaaatgctactattcccgatggtacagtgatttag

SEQ ID NO: 33 - DNA, 1290 bp, Anabaena variabilis
gtgaaaaaagtcttagcaattattcttggtggtggtgcgggtactcgcctttacccactaaccaaactccgcgctaaaccggcagtaccagtggcagggaaataccgcctaatagatatccctgtcagtaactgcattaattcggaaatttttaaaatctacgtattaacacaatttaactcagcttctctcaatcgccacattgcccgtacctacaactttagtggttttagcgagggttttgtggaagtgctggccgcccagcagacaccagagaaccctaactggttccaaggtacagccgatgctgtacgtcagtatctctggatgttacaagagtgggacgtagatgaatttttgatcctgtcaggagatcacctgtaccggatggattatcgcctatttatccagcgccatcgagaaaccaatgcggatatcacactttccgtaattcccattgacgatcgccgcgcctcggattttggtttaatgaagatcgataactctggacgagtcatcgattttagcgaaaaacccaaaggcgaagccttaaccaaaatgcgtgttgataccaccgttttaggcttgacaccagaacaggcagcatcacagccttacatcgcctcgatggggatttacgtatttaaaaaagatgttttgatcaaactgttgaaggaatctttagaacgtactgatttcggcaaagaaattattcctgatgcctccaaagatcacaacgttcaagcttacttattcgatgactactgggaagatattgggacaatcgaagctttttataatgctaatttagcattgactcagcagcccatgccgccctttagcttctacgacgaagaagcaccaatttatacccgcgcacgttacttaccacccacaaaactattagattgccacgttacagaatcaatcattggcgaaggctgtattctgaaaaactgtcgcattcaacactcagtattgggagtgcgatcgcgtattgaaaccggctgcgtcatcgaagaatctttactcatgggtgccgacttctaccaagcttcagtggaacgccagtgcagcattgacaaaggagacatccccgtaggcatcggcccagataccattattcgccgtgccatcatcgataaaaatgcccgcatcggtcacgatgtcaaaattatcaataaagacaacgtgcaggaagccgaccgcgaaagtcaaggattttacatccgcagtggcattgtcgtcgttctcaaaaatgccgtcattaccgatggcacaataatttag

SEQ ID NO: 34 - DNA, 1290 bp, Nostoc sp. PCC 7120
gtgaaaaaagtcttagcaattattcttggtggtggtgcgggtactcgcctttacccactaaccaaactccgcgctaaaccggcagtaccagtggcagggaaataccgcctaatagatatccctgtcagtaactgcattaattcggaaatttttaaaatctacgtattaacacaatttaactcagcttctctcaatcgccacattgcccgtacctacaactttagtggttttagcgagggttttgtggaagtgctggccgcccagcagacaccagagaaccctaactggttccaaggtacagccgatgctgtacgtcagtatctctggatgttacaagagtgggacgtagatgaatttttgatcctgtcgggggatcacctgtaccggatggactatcgcctatttatccagcgccatcgagaaaccaatgcggatatcacactttccgtaattcccattgatgatcgccgcgcctcggattttggtttaatgaaaatcgataactctggacgagtcattgatttcagtgaaaaacccaagggcgaagccttaaccaaaatgcgtgttgataccacggttttaggcttgacaccagaacaggcggcatcacagccttacattgcctcgatggggatttacgtatttaaaaaagacgttttgatcaagctgttgaaggaagctttagaacgtactgatttcggcaaagaaattattcctgatgccgccaaagatcacaacgttcaagcttacctattcgatgactactgggaagatattgggacaatcgaagctttttataacgccaatttagcgttaactcagcagcccatgccgccctttagcttctacgatgaagaagcacctatttatacccgcgctcgttacttaccacccacaaaactattagattgccacgttacagaatcaatcattggcgaaggctgtattctgaaaaactgtcgcattcaacactcagtattgggagtgcgatcgcgtattgaaactggctgcatgatcgaagaatctttactcatgggtgccgacttctaccaagcttcagtggaacgccagtgcagcatcgataaaggagacatccctgtaggcatcggtccagatacaatcattcgccgtgccatcatcgataaaaatgcccgcatcggtcacgatgtcaaaattatcaataaagacaacgtgcaagaagccgaccgcgaaagtcaaggattttacatccgcagtggcattgtcgtcgtcctcaaaaatgccgttattacagatggcacaatcatttag

SEQ ID NO: 35 - DNA, 1398 bp, Synechococcus elongatus PCC 7942
atgcggattctgttcgtggctgccgaatgtgctcccttcgccaaagtgggaggcatgggagatgtggttggttccctgcccaaagtgctgaaagctctgggccatgatgtccgaatcttcatgccgtactacggctttctgaacagtaagctcgatattcccgctgaaccgatctggtggggctacgcgatgtttaatcacttcgcggtttacgaaacgcagctgcccggttcagatgtgccgctctacttaatggggcatccagcttttgatccgcatcgcatctactcaggagaagacgaagactggcgcttcacgttttttgccaatggggctgctgaattttcttggaactactggaaaccacaagtcattcactgccacgattggcacactgggatgattccggtttggatgcaccagtccccggatatctcgactgtcttcaccattcataacttggcctaccaagggccgtggcgctggaagctcgagaaaatcacctggtgcccttggtacatgcagggcgacagcaccatggcggcggccttgctctatgccgatcgcgtcaacacggtatcgcccacctatgcccagcagattcaaacaccgacctacggtgaaaagctggagggtcttctctcatttatcagtggcaagctaagcggcatccttaacgggattgatgttgatagctacaaccctgcaacggatacgcggattgtggccaactacgatcgcgacactcttgataaacgactgaacaataagctggcgctccaaaaggagatggggcttgaggtcaatcccgatcgcttcctgattggctttgtggctcgtctagtcgagcagaagggcattgacttgctgctgcaaattcttgatcgctttctgtcttacagcgatgcccaatttgttgtcttaggaacgggcgagcgctactacgaaacccagctctgggagttggcgacccgctatccgggccggatgtccacttatctgatgtacgacgaggggctgtcgcgacgcatttatgccggtagcgacgccttcttggtgccctctcgttttgaaccttgcggtatcacgcaaatgctggcactgcgctacggcagtgtgccgattgtgcgccgtacgggggggttggtcgatacggtcttccaccacgatccgcgtcatgccgagggcaatggctattgcttcgatcgctacgagccgctggacctctatacctgtctggtgcgggcttgggagagttaccagtaccagccccaatggcaaaagctacagcaacggggtatggccgttgatctgagctggaaacaatcggcgatcgcctacgaacagctctacgctgaagcgattgggctaccgatcgatgtcttacaggaggcctag

SEQ ID NO: 36 - DNA, 1434 bp, Synechocystis sp. PCC 6803
atgaagattttatttgtggcggcggaagtatcccccctagcaaaggtaggtggcatgggggatgtggtgggttccctgcctaaagttctgcatcagttgggccatgatgtccgtgtcttcatgccctactacggtttcatcggcgacaagattgatgtgcccaaggagccggtctggaaaggggaagccatgttccagcagtttgctgtttaccagtcctatctaccggacaccaaaattcctctctacttgttcggccatccagctttcgactcccgaaggatctatggcggagatgacgaggcgtggcggttcacttttttttctaacggggcagctgaatttgcctggaaccattggaagccggaaattatccattgccatgattggcacactggcatgatccctgtttggatgcatcagtccccagacatcgccaccgttttcaccatccataatcttgcttaccaagggccctggcggggcttgcttgaaactatgacttggtgtccttggtacatgcagggagacaatgtgatggcggcggcgattcaatttgccaatcgggtgactaccgtttctcccacctatgcccaacagatccaaaccccggcctatggggaaaagctggaagggttattgtcctacctgagtggtaatttagtcggtattctcaacggtattgatacggagatttacaacccggcggaagaccgctttatcagcaatgttttcgatgcggacagtttggacaagcgggtgaaaaataaaattgccatccaggaggaaacggggttagaaattaatcgtaatgccatggtggtgggtatagtggctcgcttggtggaacaaaaggggattgatttggtgattcagatccttgaccgcttcatgtcctacaccgattcccagttaattatcctcggcactggcgatcgccattacgaaacccaactttggcagatggcttcccgatttcctgggcggatggcggtgcaattactccacaacgatgccctttcccgtcgagtctatgccggggcggatgtgtttttaatgccttctcgctttgagccctgtgggctgagtcaattgatggccatgcgttatggctgtatccccattgtgcggcggacagggggtttggtggatacggtatccttctacgatcctatcaatgaagccggcaccggctattgctttgaccgttatgaacccctggattgctttacggccatggtgcgggcctgggagggtttccgtttcaaggcagattggcaaaaattacagcaacgggccatgcgggcagactttagttggtaccgttccgccggggaatatatcaaagtttataagggcgtggtggggaaaccggaggaattaagccccatggaagaggaaaaaatcgctgagttaactgcttcctatcgctaa

SEQ ID NO: 37 - DNA, 1437 bp, Synechococcus sp. PCC 7002
atgcgtattttgtttgtttctgccgaggctgctcccatcgctaaagctggaggcatgggagatgtggtgggatcactgcctaaagttttacggcagttaggacatgacgcgagaattttcttaccctattacggctttctcaacgacaaactcgacatccctgcagaacccgtttggtggggcagtgcgatgttcaatacttttgccgtttatgaaactgtgttgcccaacaccgatgtccccctttatctgtttggccatcccgcctttgatggacggcatatttatggtgggcaggatgaattttggcgctttaccttttttgccaatggggccgctgaatttatgtggaaccactggaaaccccagatcgcccactgtcacgactggcacacgggcatgattccggtatggatgcaccaatcgccggatatcagtacggtgtttacgatccacaacttagcctaccaagggccttggcggggtttcctggagcgcaatacttggtgtccctggtatatggatggtgataacgtgatggcttcggcgctgatgtttgccgatcaggtgaacaccgtatctcccacctatgcccaacaaatccaaaccaaagtctatggtgaaaaattagagggtttgttgtcttggatcagtggcaaaagtcgcggcatcgtgaatggtattgacgtagaactttataatccttctaacgatcaagccctggtgaagcaattttctacgactaatcttgaggatcgggccgccaacaaagtgattatccaagaagaaacggggctagaggtcaactccaaggcttttttgatggcgatggtcacccgcttagtggaacaaaagggcattgatctgctgctaaatatcctggagcagtttatggcatacactgacgcccagctcattatcctcggcactggcgatcgccactacgaaacccaactctggcagactgcctaccgctttaaggggcggatgtccgtgcaactgctctataatgatgccctctcccgccggatttacgctggatccgatgtctttttgatgccgtcacgctttgagccctgtggcattagtcaaatgatggcgatgcgctacggttctgtaccgattgtgcggcgcaccgggggtttggtggatacggtctctttccatgatccgattcaccaaaccgggacaggctttagttttgaccgctacgaaccgctggatatgtacacctgcatggtgcgggcttgggaaagtttccgctacaaaaaagactgggctgaactacaaagacgaggcatgagccatgactttagttggtacaaatctgccggggaatatctcaagatgtaccgccaaagcattaaagaagctccggaattaacgaccgatgaagccgaaaaaatcacctatttagtgaaaaaacacgccatttaa

SEQ ID NO: 38 - DNA, 1542 bp, Synechococcus sp. WH8102
atgcgcatcctcttcgctgccgcggaatgcgccccgatgatcaaggtcggtggcatgggggatgtggtgggatcgctgcctccggctctggccaagcttggccacgacgtgcggctgatcatgccgggctactccaagctctggaccaagctgacgatctcggacgaacccatctggcgcgcccagacgatgggtacggaattcgcggtttacgagacgaagcatccaggcaatgggatgaccatctacctggtgggacatccggtgttcgatcccgagcggatctatggcggtgaagatgaggactggcgcttcaccttctttgccagtgccgccgctgaattcgcctggaatgtctggaagccgaatgttcttcactgccacgactggcacaccggcatgattccggtctggatgcaccaggacccggagatcagcacggtcttcaccatccacaacctcaagtaccagggcccctggcgttggaagctggatcgcatcacctggtgcccctggtacatgcagggagatcacaccatggcggcggcacttctgtacgccgaccgggtcaacgccgtctcccccacctacgccgaggaaatccgtacggcggagtacggcgaaaagctggatggtttgctcaatttcgtctccggcaagctgcgcggcatcctcaatggcattgacctcgaggcctggaacccccagaccgatggggctctgccggccaccttcagcgccgacgacctctccggtaaagcggtctgcaagcgggtgttgcaggagcgcatgggtcttgaggtgcgtgacgacgcctttgtcctcggcatggtcagccgactcgtcgatcagaagggcgtcgatctgcttctgcaggtggcggaccgtttgctcgcctacaccgacacgcagatcgtggtgctcggcaccggtgaccgtggcctggaatccggcctgtggcagctggcctcccgccatgccggccgttgcgccgtcttcctcacctacgacgacgacctctcccgactgatctatgccggcagtgacgccttcctgatgcccagtcgcttcgagccctgcggcatcagccagctgtacgccatgcgttacggctccgttcctgtggtgcgcaaggtgggcggcctggtggacaccgttcctccccacagtccagctgatgccagcgggaccggcttctgcttcgatcgttttgagccggtcgacttctacaccgcattggtgcgtgcctgggaggcctaccgccatcgcgacagctggcaggagttgcagaagcgcggcatgcagcaggactacagctgggaccgttcggccatcgattacgacgtcatgtaccgcgatgtctgcggtctgaaggaacccacccctgatgccgcgatggtggaacagttctcccagggacaggctgcggatccctcccgcccagaggatgatgcgatcaatgctgctcccgaggcggtcaccgcgccgtccggccccagccgcaacccccttaatcgtctcttcggccgcagggccgactga

SEQ ID NO: 39 - DNA, 1524 bp, Synechococcus sp RCC 307
atgcgcatcctctttgctgcggccgaatgcgcaccgatggtgaaagtcggcggcatgggagatgtggtgggatctctgcctccagccctcgctgagttgggtcacgacgtgcgcgtgatcatgcccggctacggcaagctctggtcccagcttgatgtgcccagcgagccgatctggcgtgcccaaaccatgggcaccgattttgctgtctatgagacccgtcaccccaagaccgggctcacgatctatttggtgggccatccggtttttgatggtgagcgcatctatggaggtgaagacgaggactggcgcttcaccttcttcgctagcgccacctccgaatttgcctggaacgcttggaagccccaggtgctgcattgccatgactggcacaccggcatgattccggtgtggatgcaccaagaccccgagatcagcacggtcttcaccatccacaacctcaaatatcaaggtccctggcgctggaagctcgagcgcatgacctggtgcccctggtacatgcagggcgaccacaccatggcggcagccttgctgtatgccgaccgcgtcaatgcggtttcacccacctacgcccaagagatccgcacgccggaatacggcgaacaactggaggggttgctgaactacatcagcggcaagctgcgaggcatcctcaatggcatcgatgtggaggcttggaatcccgccactgattcgcggattccggccacctacagcactgctgacctcagtggcaaagccgtctgcaagcgggctctgcaagagcgcatggggcttcaggtgaaccccgacacctttgtgatcggtttggtgagccgtttggtggaccaaaaaggcgtcgacctgctgctgcaggttgccgaacgcttccttgcctacaccgatacgcagatcgttgtgttgggcaccggggatcgccatttggaatcgggcctgtggcaaatggcgagtcagcacagcggccgcttcgcttccttcctcacctacgacgatgatctctcccggctgatctacgccggcagtgatgccttcttgatgccctcgcgctttgagccctgcggcatcagccagttgctctcgatgcgctacggcaccatcccggtggtgcgccgcgtcggtggactggtcgacaccgtgcctccctatgttcccgccacccaagagggcaatggcttctgcttcgaccgctatgaagcgatcgacctttacaccgccttggtgcgcgcctgggaggcctaccgccatcaagacagctggcagcaattgatgaagcgggtgatgcaggttgatttcagctgggctcgttccgccttggaatacgaccgcatgtatcgcgatgtttgcggaatgaaggagcccacgccggaagccgatgcggtggcggccttctccattccccagccgcctgaacagcaggccgcacgtgctgccgctgaagccgctgaccccaacccccaacggcgctttaatccccttggattgctgcgccgaaacggcggttga

SEQ ID NO: 40 - DNA, 1383 bp, Trichodesmium erythraeum IMS 101
atgcgaattttatttgtgtctgctgaagcgactcctttagcaaaagttggtggtatggcagatgtagtgggtgccttacccaaagtactacggaaaatgggtcacgatgttcgtatcttcatgccttattatggctttttaggcgacaagatggaagttcctgaggaacctatctgggaaggaacggccatgtatcaaaactttaagatttatgagacggtactaccaaaaagtgacgtgccattgtacctatttggtcacccggctttttggccacgtcatatttactatggagatgatgaggactggagattcactctatttgctaatggggcggccgagttttgctggaatggctggaaaccagagatagttcattgtaatgactggcacactggcatgattccagtttggatgcacgaaactccagacattaaaaccgtatttactattcataacctagcttatcaaggaccttggcgctggtacttggaaagaattacttggtgtccttggtacatggaagggcataatacaatggcagcagcagttcagtttgcagatcgggtaactactgtttctccaacctatgctagtcagatccaaacacctgcctacggagaaaatctagatggtttaatgtcttttattacggggaaactacacggtatcctcaatggtattgatatgaacttttataatccagctaatgacagatatattcctcaaacttatgatgtcaataccctggaaaaacgggttgacaataaaattgctcttcaagaagaagtaggttttgaagttaacaaaaatagctttctcatgggaatggtctcccgactggtagaacaaaaaggacttgatttaatgctgcaagtcttagatcggtttatggcttatactgatactcagtttattttgttgggtacaggcgatcgcttctatgaaacccaaatgtggcaaatagcaagtcgttatcctggtcggatgagtgtccaacttttacataatgatgccctttcccgacgaatatatgcaggtactgatgctttcttaatgcccagtcgatttgagccttgtggtattagtcagttattggcaatgcgttatggtagtatacctattgtccgtcgcacaggtgggttagttgatactgtctctttctatgatcctattaataatgtaggtactggctattcttttgatcgctatgaaccactagacctgcttactgcaatggtccgagcctatgaaggtttccggttcaaagatcaatggcaggagttacagaagcgtggcatgagagagaactttagctgggataagtcagctcaaggttatatcaaaatgtacaaatcaatgctcggattacctgaagaataa

SEQ ID NO: 41 - DNA, 1419 bp, Anabaena variabilis
atgcggattctatttgtggcagcagaagcagcacccatcgcaaaagtaggagggatgggtgatgttgtcggtgcattacctaaggtcttgagaaaaatggggcatgatgtgcgtatcttcttgccctattacggctttttgccagacaaaatggaaattcccaaagatccaatctggaagggatacgccatgtttcaggactttacagttcacgaagcagttctgcctggtactgatgttcccttgtatttatttggacatccagccttcaacccccggcgaatttattcgggagatgatgaagactggcggttcaccttgttttccaatggtgcggcggaattttgttggaattactggaaaccagaaattattcactgtcacgattggcacacaggcatgattcctgtgtggatgaaccaatcaccagatatcaccacagtcttcactatccacaacctagcttaccaagggccttggcgttggtatctagataaaattacttggtgtccttggtatatgcagggacacaacacaatggcggcggctgtccagtttgctgacagagtaaataccgtttctcctacatacgccgagcaaatcaagaccccggcttacggtgagaaaatagaaggcttgctgtctttcatcagtggtaaattatctgggattgttaacggtatagatacggaagtttatgacccagctaatgataaatttattgctcaaacttttactgctgatactttagataaacgcaaagccaacaaaattgctttacaagaagaagtagggttagaagttaacagcaatgcctttttaattggcatggtgacaaggttagtcgagcagaagggtttagatttagtcatccaaatgctcgatcgctttatggcttatactgatgctcagttcgtcttgttaggaacaggcgatcgctactacgaaactcaaatgtggcaattagcatcccgctaccccggacgtatggccacctatctcctatacaatgatgccctatcccgccgcatctacgccggttctgatgcctttttaatgcccagccgctttgaaccatgcggtattagccagatgatggctttacgctacggttccatccccatcgttcgccgcactgggggtttagttgacaccgtatcccaccacgaccccgtaaacgaagccggtacaggctactgctttgaccgctacgaacccctagacttattcacctgcatgattcgcgcctgggaaggcttccgctacaaaccccaatggcaagaactacaaaagcgtggtatgagtcaagacttcagctggtacaaatccgctaaggaatacgacagactctatcgctcaatatacggtttgccagaagcagaagagacacagccagagttaattctggcaaatcagtag

SEQ ID NO: 42 - DNA, 1419 bp, Nostoc sp. PCC 7120
atgcggattctatttgtggcagcagaagcagcacccattgcaaaagtaggagggatgggtgatgttgtcggtgcattacctaaggtcttgagaaaaatggggcatgatgtacgtatcttcttgccctattacggctttttgccagacaaaatggagattcccaaagatccaatatggaagggatacgccatgtttcaggactttacagttcacgaagcagttctgcctggtactgatgttcccttgtatttatttggacatccagcctttaccccccggcggatttattcgggagatgatgaagactggcgcttcaccttgttttccaatggtgcggctgagttttgctggaattactggaaacccgacattattcactgtcatgattggcacacgggcatgattcctgtgtggatgaaccaatcaccagatatcaccacagtcttcactatccacaatctggcttaccaagggccttggcgttggtatttagataaaattacttggtgtccttggtatatgcagggacacaacacaatggcggcggctgtccagtttgcggacagggtaaatacagtttctcccacatacgccgagcaaatcaagaccccggcttacggtgagaaaatagaaggtttgctgtctttcatcagtggtaaattatctgggattgttaacggtatagatacggaagtttacgacccagctaatgataaatatattgctcaaacgttcactgccgatactttagataaacgcaaagccaacaaaattgctttacaagaagaagtaggattagaagttaacagcaatgcctttttaattggcatggtgacaaggttagtcgagcagaagggcttagatttagtcatccaaatgctcgatcgctttatggcttatactgatgctcagttcgtcttgttgggaacaggcgatcgctactacgaaacccaaatgtggcaattagcatcccgctaccccggtcgtatggctacttacctcctgtataacgatgccctatctcgccgcatctacgctggtactgatgcctttttgatgcccagtcgctttgaaccatgcggtattagtcaaatgatggctttacgctacggttccattcccatcgtccgccgcactggaggcttggttgacaccgtatcccaccacgaccccatcaacgaagcaggtacaggctactgcttcgaccgctacgaacccctcgacttatttacctgcatgattcgcgcctgggaaggcttccgctacaaaccacaatggcaagaactacaaaaacgcggtatgagtcaagacttcagctggtacaaatccgctaaggaatacgacaaactctatcgctcaatgtacggtttgccagacccagaagagacacagccggagttaattctgacaaatcagtag

SEQ ID NO: 43 - DNA, 1953 bp, Synechococcus elongatus PCC 7942 0918
atggtgactggaaccgccctcgcgcaaccccgcgccattacgccccacgaacagcagcttttggccaaactgaaaagctatcgcgatatccaaagcttgtcgcaaatttggggacgtgctgccagtcaatttggatcgatgccggctttggttgcaccccatgccaaaccagcgatcaccctcagttatcaagaattggcgattcagatccaagcgtttgcagccggactgctcgcgctgggagtgcctacctccacagccgatgactttccgcctcgcttggcgcagtttgcggataacagcccccgctggttgattgctgaccaaggcacgttgctggcaggggctgccaatgcggtgcgcggcgcccaagctgaagtatcggagctgctctacgtcttagaggacagcggttcgatcggcttgattgtcgaagacgcggcgctgctgaagaaactacagcctggtttagcgtcactatcgctgcagtttgtgatcgtgctcagcgatgaagtagtcgagatcgacagcctgcgcgtcgttggttttagtgacgtgctggagatggggcgatcgctgccggcaccggagccaattttgcagctcgatcgcttagccactttgatctatacctcgggcaccacaggcccaccgaagggcgtgatgctttctcacggcaacctgctgcaccaagtcacaacattaggtgtggttgtgcagccgcaacctggcgacaccgtgctgagtattttgccgacttggcactcctacgagcgagcttgtgaatatttcctgctctcccagggctgcacacaggtctacacgacgctgcgcaatgtcaaacaagacatccggcagtatcggccgcagttcatggtcagtgtgctgcgcctctgggaatcgatctacgagggcgtgcagaagcagtttcgcgagcaaccggcgaagaaacgtcgcttgatcgataccttctttggcttgagtcaacgctatgttttggcacggcgccgctggcaaggactggatttgctggcactgaaccaatccccagcccagcgcctcgctgagggtgtccggatgttggcgctagcaccgttgcataagctgggcgatcgcctcgtctacggcaaagtacgagaagccacgggtggccgaattcggcaggtgatcagtggcggtggctcactggcactgcacctcgataccttcttcgaaattgttggtgttgatttgctggtgggttatggcttgacagaaacctcaccagtgctgacggggcgacggccttggcacaacctacggggttcggccggtcagccgattccaggtacggcgattcggatcgtcgatcctgaaacgaaggaaaaccgacccagtggcgatcgcggcttggtgctggcgaaagggccgcaaatcatgcagggctacttcaataaacccgaggcgaccgcgaaagcgatcgatgccgaaggttggtttgacaccggcgacttaggctacatcgtcggtgaaggcaacttggtgctaacggggcgcgctaaggacacgatcgtgctgaccaatggcgaaaacattgaaccccagccgattgaagatgcctgcctacgaagttcctatatcagccaaatcatgttggtgggacaagaccgcaagagtttgggggcgttgattgtgcccaatcaagaggcgatcgcactctgggccagcgaacagggcatcagccaaaccgatctgcagggagtggtacagaagctgattcgcgaggaactgaaccgcgaagtgcgcgatcgcccgggctaccgcatcgacgatcgcattggaccattccgcctcatcgaagaaccgttcagcatggaaaatggccagctaacccaaaccctgaaaatccgtcgcaacgttgtcgcggaacactacgcggctatgatcgacgggatgtttgaatcggcgagttaa

SEQ ID NO: 44 - protein, 650 aa, Synechococcus elongatus PCC 7942 0918
MVTGTALAQPRAITPHEQQLLAKLKSYRDIQSLSQIWGRAASQFGSMPALVAPHAKPAITLSYQELAIQIQAFAAGLLALGVPTSTADDFPPRLAQFADNSPRWLIADQGTLLAGAANAVRGAQAEVSELLYVLEDSGSIGLIVEDAALLKKLQPGLASLSLQFVIVLSDEVVEIDSLRVVGFSDVLEMGRSLPAPEPILQLDRLATLIYTSGTTGPPKGVMLSHGNLLHQVTTLGVVVQPQPGDTVLSILPTWHSYERACEYFLLSQGCTQVYTTLRNVKQDIRQYRPQFMVSVLRLWESIYEGVQKQFREQPAKKRRLIDTFFGLSQRYVLARRRWQGLDLLALNQSPAQRLAEGVRMLALAPLHKLGDRLVYGKVREATGGRIRQVISGGGSLALHLDTFFEIVGVDLLVGYGLTETSPVLTGRRPWHNLRGSAGQPIPGTAIRIVDPETKENRPSGDRGLVLAKGPQIMQGYFNKPEATAKAIDAEGWFDTGDLGYIVGEGNLVLTGRAKDTIVLTNGENIEPQPIEDACLRSSYISQIMLVGQDRKSLGALIVPNQEAIALWASEQGISQTDLQGVVQKLIREELNREVRDRPGYRIDDRIGPFRLIEEPFSMENGQLTQTLKIRRNVVAEHYAAMIDGMFESAS

SEQ ID NO: 45 - protein, 325 aa, Synechococcus sp. PCC7002
MPKTERRTFLLDFEKPLSELESRIHQIRDLAAENNVDVSEQIQQLEARADQLREEIFSTLTPAQRLQLARHPRRPSTLDYVQMMADEWFELHGDRGGSDDPALIGGVARFDGQPVMMLGHQKGRDTKDNVARNFGMPAPGGYRKAMRLMDHANRFGMPILTFIDTPGAWAGLEAEKLGQGEAIAFNLREMFSLDVPIICTVIGEGGSGGALGIGVGDRVLMLKNSVYTVATPEACAAILWKDAGKSEQAAAALKITAEDLKSLEIIDEIVPEPASCAHADPIGAAQLLKAAIQDNLQALLKLTPERRRELRYQRFRKIGVFLESS

SEQ ID NO: 46 - protein, 165 aa, Synechococcus sp. PCC 7002
MAINLQEIQELLSTIGQTNVTEFELKTDDFELRVSKGTVVAAPQTMVMSEAIAQPAMSTPVVSQATATPEASQAETPAPSVSIDDKWVAITSPMVGTFYRAPAPGEDPFVAVGDRVGNGQTVCIIEAMKLMNEIEAEVSGEVVKIAVEDGEPIEFGQTLMWVNPT

SEQ ID NO: 47 - protein, 448 aa, Synechococcus sp. PCC 7002
MQFSKILIANRGEVALRIIHTCQELGIATVAVHSTVDRQALHVQLADESICIGPPQSSKSYLNIPNIIAAALSSNADAIHPGYGFLAENAKFAEICADHQITFIGPSPEAMIAMGDKSTAKKTMQAAKVPTVPGSAGLVASEEQALEIAQQIGYPVMIKATAGGGGRGMRLVPSAEELPRLYRAAQGEAEAAFGNGGVYIEKFIERPRHIEFQILADQYGNVIHLGERDCSIQRRHQKLLEEAPSAILTPRLRDKMGKAAVKAAKSIDYVGAGTVEFLVDKNGDFYFMEMNTRIQVEHPVTEMVTGLDLIAEQIKVAQGDRLSLNQNQVNLNGHAIECRINAEDPDHDFRPTPGKISGYLPPGGPGVRMDSHVYTDYEISPYYDSLIGKLIVWGPDRDTAIRRMKRALRECAITGVSTTISFHQKILNHPAFLAADVDTNFIQQHMLP

SEQ ID NO: 48 - protein, 319 aa, Synechococcus sp. PCC 7002
MSLFDWFAANRQNSETQLQPQQEREIADGLWTKCKSCDALTYTKDLRNNQMVCKECGFHNRVGSRERVRQLIDEGTWTEISQNVAPTDPLKFRDKKAYSDRLKDYQEKTNLTDAVITGTGLIDGLPLALAVMDFGFMGGSMGSVVGEKICRLVEHGTAEGLPVVVVCASGGARMQEGMLSLMQMAKISGALERHRTKKLLYIPVLTNPTTGGVTASFAMLGDLILAEPKATIGFAGRRVIEQTLREKLPDDFQTSEYLLQHGFVDAIVPRTELKKTLAQMISLHQPFHPILPELQLAPHVEKEKVYEPIASTSTNDFYK

SEQ ID NO: 49 - protein, 2311 aa, Triticum aestivum
MGSTHLPIVGLNASTTPSLSTIRPVNSAGAAFQPSAPSRTSKKKSRRVQSLRDGGDGGVSDPNQSIRQGLAGIIDLPKEGTSAPEVDISHGSEEPRGSYQMNGILNEAHNGRHASLSKVVEFCMALGGKTPIHSVLVANNGRAAAKFMRSVRTWANETFGSEKAIQLIAMATPEDMRINAEHIRIADQFVEVPGGTNNNNYANVQLIVEIAVRTGVSAVWPGWGHASENPELPDALNANGIVFLGPPSSSMNALGDKVGSALIAQAAGVPTLPWGGSQVEIPLEVCLDSIPAEMYRKACVSTTEEALASCQMIGYPAMIKASWGGGGKGIRKVNNDDDVRALFKQVQGEVPGSPIFIMRLASQSRHLEVQLLCDQYGNVAALHSRDCSVQRRHQKIIEEGPVTVAPRETVKELEQAARRLAKAVGYVGAATVEYLYSMETGEYYFLELNPRLQVEHPVTEWIAEVNLPAAQVAVGMGIPLWQVPEIRRFYGMDNGGGYDIWRETAALATPFNFDEVDSQWPKGHCVAVRITSEDPDDGFKPTGGKVKEISFKSKPNVWAYFSVKSGGGIHEFADSQFGHVFAYGVSRAAAITNMSLALKEIQIRGEIHSNVDYTVDLLNASDFKENRIHTGWLDNRIAMRVQAERPPWYISVVGGALYKTITSNTDTVSEYVSYLVKGQIPPKHISLVHSTVSLNIEESKYTIETIRSGQGSYRLRMNGSVIEANVQTLCDGGLLMQLDGNSHVIYAEEEAGGTRLLIDGKTYLLQNDHDPSRLLAETPCKLLRFLVADGAHVEADVPYAEVEVMKMCMPLLSPAAGVINVLLSEGQPMQAGDLIARLDLDDPSAVKRAEPFNGSFPEMSLPIAASGQVHKRCATSLNAARMVLAGYDHPINKVVQDLVSCLDAPELPFLQWEELMSVLATRLPRLLKSELEGKYSEYKLNVGHGKSKDFPSKMLREIIEENLAHGSEKEIATNERLVEPLMSLLKSYEGGRESHAHFIVKSLFEDYLSVEELFSDGIQSDVIERLRQQHSKDLQKVVDIVLSHQGVRNKTKLILTLMEKLVYPNPAVYKDQLTRFSSLNHKRYYKLALKASELLEQTKLSELRTSIARSLSELEMFTEERTAISEIMGDLVTAPLPVEDALVSLFDCSDQTLQQRVIETYISRLYQPHLVKDSIQLKYQESGVIALWEFAEAHSEKRLGAMVIVKSLESVSAAIGAALKGTSRYASSEGNIMHIALLGADNQMHGTEDSGDNDQAQVRIDKLSATLEQNTVTADLRAAGVKVISCIVQRDGALMPMRHTFLLSDEKLCYGEEPVLRHVEPPLSALLELGKLKVKGYNEVKYTPSRDRQWNIYTLRNTENPKMLHRVFFRTLVRQPGASNKFTSGNISDVEVGGAEESLSFTSSSILRSLMTAIEELELHAIRTGHSHMFLCILKERKLLDLVPVSGNKVVDIGQDEATACLLLKEMALQIHELVGARMHHLSVCQWEVKLKLDSDGPASGTWRVVTTNVTSHTCTVDIYREVEDTESQKLVYHSAPSSSGPLHGVALNTPYQPLSVIDLKRCSARNNRTTYCYDFPLAFETAVQKSWSNISSDNNRCYVKATELVFAHKNGSWGTPVIPMERPAGLNDIGMVAWILDMSTPEYPNGRQIVVIANDITFRAGSFGPREDAFFETVTNLACERRLPLIYLAANSGARIGIADEVKSCFRVGWSDDGSPERGFQYIYLTEEDHARISASVIAHKMQLDNGEIRWVIDSVVGKEDGLGVENIHGSAAIASAYSRAYEETFTLTFVTGRTVGIGAYLARLGIRCIQRTDQPIILTGFSALNKLLGREVYSSHMQLGGPKIMATNGVVHLTVSDDLEGVSNILRWLSYVPANIGGPLPITKSLDPPDRPVAYIPENTCDPRAAISGIDDSQGKWLGGMFDKDSFVETFEGWAKSVVTGRAKLGGIPVGVIAVETQTMMQLIPADPGQLDSHERSVPRAGQVWFPDSATKTAQAMLDFNREGLPLFILANWRGFSGGQRDLFEGILQAGSTIVENLRAYNQPAFVYIPKAAELRGGAWVVIDSKINPDRIEFYAERTAKGNVLEPQGLIEIKFRSEELQECMGRLDPELINLKAKLQGVKHENGSLPESESLQKSIEARKKQLLPLYTQIAVRFAELHDTSLRMAAKGVIKKVVDWEDSRSFFYKRLRRRISEDVLAKEIRGVSGKQFSHQSAIELIQKWYLASKGAETGSTEWDDDDAFVAWRENPENYQEYIKEPRAQRVSQLLSDVADSSPDLEALPQGLSMLLEKMDPAKREIVEDFEINLVK

SEQ ID NO: 50 - DNA, 978 bp, Synechococcus sp. PCC 7002
atgccgaaaacggagcgccggacgtttctgcttgattttgaaaaacctctttcggaattagaatcacgcatccatcaaattcgtgatcttgctgcggagaataatgttgatgtttcagaacagattcagcagctagaggcgcgggcagaccagctccgggaagaaatttttagtaccctcaccccggcccaacggctgcaattggcacggcatccccggcgtcccagcacccttgattatgttcaaatgatggcggacgaatggtttgaactccatggcgatcgcggtggatctgatgatccggctctcattggcggggtggcccgcttcgatggtcaaccggtgatgatgctagggcaccaaaaaggacgggatacgaaggataatgtcgcccgcaattttggcatgccagctcctgggggctaccgtaaggcgatgcggctgatggaccatgccaaccgttttgggatgccgattttaacgtttattgatactcctggggcttgggcgggtttagaagcggaaaagttgggccaaggggaggcgatcgcctttaacctccgggaaatgtttagcctcgatgtgccgattatttgcacggtcattggcgaaggcggttccggtggggccttagggattggcgtgggcgatcgcgtcttgatgttaaaaaattccgtttacacagtggcgaccccagaggcttgtgccgccattctctggaaagatgccgggaaatcagagcaggccgccgccgccctcaagattacagcagaggatctgaaaagccttgagattatcgatgaaattgtcccagagccagcctcctgcgcccacgccgatcccattggggccgcccaactcctgaaagcagcgatccaagataacctccaagccttgctgaagctgacgccagaacgccgccgtgaattgcgctaccagcggttccggaaaattggtgtgtttttagaaagttcctaa

SEQ ID NO: 51 - DNA, 498 bp, Synechococcus sp.  PCC 7002
atggctattaatttacaagagatccaagaacttctatccaccatcggccaaaccaatgtcaccgagtttgaactcaaaaccgatgattttgaactccgtgtgagcaaaggtactgttgtggctgctccccagacgatggtgatgtccgaggcgatcgcccaaccagcaatgtccactcccgttgtttctcaagcaactgcaaccccagaagcctcccaagcggaaaccccggctcccagtgtgagcattgatgataagtgggtcgccattacctcccccatggtgggaacgttttaccgcgcgccggcccctggtgaagatcccttcgttgccgttggcgatcgcgttggcaatggtcaaaccgtttgcatcatcgaagcgatgaaattaatgaatgagattgaggcagaagtcagcggtgaagttgttaaaattgccgttgaagacggtgaacccattgaatttggtcagaccctaatgtgggtcaacccaacctaa

SEQ ID NO: 52 - DNA, 1347 bp, Synechococcus sp. PCC 7002
atgcagttttcaaagattctcatcgccaatcgcggagaagttgccctacgcattatccacacctgtcaggagctcggcattgccacagttgccgtccactccaccgtagatcgccaagccctccacgttcagctcgccgatgagagcatttgcattggcccgccccagagcagcaaaagctatctcaacattcccaatattatcgctgcggccctcagcagtaacgccgacgcaatccacccaggctacggtttcctcgctgaaaatgccaagtttgcagaaatttgtgccgaccaccaaatcaccttcattggcccttccccagaagcaatgatcgccatgggggacaaatccaccgccaaaaaaacgatgcaggcggcaaaagtccctaccgtacccggtagtgctgggttggtggcctccgaagaacaagccctagaaatcgcccaacaaattggctaccctgtgatgatcaaagccacggcgggtggtggtggccgggggatgcgccttgtgcccagcgctgaggagttaccccgtttgtaccgagcggcccagggggaagcagaagcagcctttgggaatggcggcgtttacatcgaaaaatttattgaacggccccgtcacatcgaatttcagatcctcgcggatcagtacggcaatgtaattcacctcggcgaacgggattgttcgatccaacggcggcaccaaaaactcctcgaagaagctcccagcgcgatcctcacccccagactgcgggacaaaatggggaaagcggcagtaaaagcggcgaaatccattgattatgtcggggcggggacggtggaattcctcgtggataagaatggggatttctactttatggaaatgaatacccgcattcaggtggaacacccggtcacagagatggtgacgggactagatctgatcgccgagcaaattaaagttgcccaaggcgatcgcctcagtttgaatcaaaatcaagtgaacttgaatggtcatgccatcgagtgccggattaatgccgaagatcccgaccatgatttccgaccgaccccaggcaaaatcagtggctatcttccccccggtggccctggggtacggatggattcccacgtttacaccgactatgaaatttctccttactacgattctttgatcggtaaattaatcgtttggggaccagaccgagacaccgccattcgccgcatgaagcgggcactccgagaatgtgccattactggagtatcgaccaccattagcttccaccaaaagattttgaatcatccggcttttttggcggccgatgtcgatacaaactttatccagcagcacatgttgccctag

SEQ ID NO: 53 - DNA, 960 bp, Synechococcus sp. PCC 7002
atgtctctttttgattggtttgccgcaaatcgccaaaattctgaaacccagctccagccccaacaggagcgcgagattgccgatggcctctggacgaaatgcaaatcctgcgatgctctcacctacactaaagacctccgcaacaatcaaatggtctgtaaagagtgtggcttccataaccgggtcggcagtcgggaacgggtacgccaattgattgacgaaggcacctggacagaaattagtcagaatgtcgcgccgaccgaccccctgaaattccgcgacaaaaaagcctatagcgatcgcctcaaagattaccaagagaaaacgaacctcaccgatgctgtaatcactggcacaggactgattgacggtttaccccttgctttggcagtgatggactttggctttatgggcggcagcatgggatccgttgtcggcgaaaaaatttgtcgcctcgtagaacatggcaccgccgaaggtttacccgtggtggttgtttgtgcttctggtggagcaagaatgcaagagggcatgctcagtctgatgcagatggcgaaaatctctggtgccctcgaacgccatcgcaccaaaaaattactctacatccctgttttgactaatcccaccaccgggggcgtcaccgctagctttgcgatgttgggcgatttgattcttgccgaacccaaagcaaccatcggttttgctggacgccgcgtcattgaacaaacattgcgcgaaaaacttcctgacgattttcagacatctgaatatttactccaacatgggtttgtggatgcgattgtgccccgcactgaattgaaaaaaaccctcgcccaaatgattagtctccatcagccctttcacccgattctgccagagctacaattggctccccatgtggaaaaagaaaaagtttacgaacccattgcctctacttcaaccaacgacttttacaagtag

SEQ ID NO: 54 - DNA, 6936 bp, Triticum aestivum
atgggatccacacatttgcccattgtcggccttaatgcctcgacaacaccatcgctatccactattcgcccggtaaattcagccggtgctgcattccaaccatctgccccttctagaacctccaagaagaaaagtcgtcgtgttcagtcattaagggatggaggcgatggaggcgtgtcagaccctaaccagtctattcgccaaggtcttgccggcatcattgacctcccaaaggagggcacatcagctccggaagtggatatttcacatgggtccgaagaacccaggggctcctaccaaatgaatgggatactgaatgaagcacataatgggaggcatgcttcgctgtctaaggttgtcgaattttgtatggcattgggcggcaaaacaccaattcacagtgtattagttgcgaacaatggaagggcagcagctaagttcatgcggagtgtccgaacatgggctaatgaaacatttgggtcagagaaggcaattcagttgatagctatggctactccagaagacatgaggataaatgcagagcacattagaattgctgatcaatttgttgaagtacccggtggaacaaacaataacaactatgcaaatgtccaactcatagtggagatagcagtgagaaccggtgtttctgctgtttggcctggttggggccatgcatctgagaatcctgaacttccagatgcactaaatgcaaacggaattgtttttcttgggccaccatcatcatcaatgaacgcactaggtgacaaggttggttcagctctcattgctcaagcagcaggggttccgactcttccttggggtggatcacaggtggaaattccattagaagtttgtttggactcgatacctgcggagatgtataggaaagcttgtgttagtactacggaggaagcacttgcgagttgtcagatgattgggtatccagccatgattaaagcatcatggggtggtggtggtaaagggatccgaaaggttaataacgacgatgatgtcagagcactgtttaagcaagtgcaaggtgaagttcctggctccccaatatttatcatgagacttgcatctcagagtcgacatcttgaagttcagttgctttgtgatcaatatggcaatgtagctgcgcttcacagtcgtgactgcagtgtgcaacggcgacaccaaaagattattgaggaaggaccagttactgttgctcctcgcgagacagtgaaagagctagagcaagcagcaaggaggcttgctaaggctgtgggttatgttggtgctgctactgttgaatatctctacagcatggagactggtgaatactattttctggaacttaatccacggttgcaggttgagcatccagtcaccgagtggatagctgaagtaaacttgcctgcagctcaagttgcagttggaatgggtatacccctttggcaggttccagagatcagacgtttctatggaatggacaatggaggaggctatgacatttggagggaaacagcagctcttgctactccatttaacttcgatgaagtggattctcaatggccaaagggtcattgtgtagcagttaggataaccagtgaggatccagatgacggattcaagcctaccggtggaaaagtaaaggagatcagttttaaaagcaagccaaatgtttgggcctatttctctgttaagtccggtggaggcattcatgaatttgctgattctcagtttggacatgtttttgcatatggagtgtctagagcagcagcaataaccaacatgtctcttgcgctaaaagagattcaaattcgtggagaaattcattcaaatgttgattacacagttgatctcttgaatgcctcagacttcaaagaaaacaggattcatactggctggctggataacagaatagcaatgcgagtccaagctgagagacctccgtggtatatttcagtggttggaggagctctatataaaacaataacgagcaacacagacactgtttctgaatatgttagctatctcgtcaagggtcagattccaccgaagcatatatcccttgtccattcaactgtttctttgaatatagaggaaagcaaatatacaattgaaactataaggagcggacagggtagctacagattgcgaatgaatggatcagttattgaagcaaatgtccaaacattatgtgatggtggacttttaatgcagttggatggaaacagccatgtaatttatgctgaagaagaggccggtggtacacggcttctaattgatggaaagacatacttgttacagaatgatcacgatccttcaaggttattagctgagacaccctgcaaacttcttcgtttcttggttgccgatggtgctcatgttgaagctgatgtaccatatgcggaagttgaggttatgaagatgtgcatgcccctcttgtcacctgctgctggtgtcattaatgttttgttgtctgagggccagcctatgcaggctggtgatcttatagcaagacttgatcttgatgacccttctgctgtgaagagagctgagccatttaacggatctttcccagaaatgagccttcctattgctgcttctggccaagttcacaaaagatgtgccacaagcttgaatgctgctcggatggtccttgcaggatatgatcacccgatcaacaaagttgtacaagatctggtatcctgtctagatgctcctgagcttcctttcctacaatgggaagagcttatgtctgttttagcaactagacttccaaggcttcttaagagcgagttggagggtaaatacagtgaatataagttaaatgttggccatgggaagagcaaggatttcccttccaagatgctaagagagataatcgaggaaaatcttgcacatggttctgagaaggaaattgctacaaatgagaggcttgttgagcctcttatgagcctactgaagtcatatgagggtggcagagaaagccatgcacactttattgtgaagtcccttttcgaggactatctctcggttgaggaactattcagtgatggcattcagtctgatgtgattgaacgcctgcgccaacaacatagtaaagatctccagaaggttgtagacattgtgttgtctcaccagggtgtgagaaacaaaactaagctgatactaacactcatggagaaactggtctatccaaaccctgctgtctacaaggatcagttgactcgcttttcctccctcaatcacaaaagatattataagttggcccttaaagctagcgagcttcttgaacaaaccaagcttagtgagctccgcacaagcattgcaaggagcctttcagaacttgagatgtttactgaagaaaggacggccattagtgagatcatgggagatttagtgactgccccactgccagttgaagatgcactggtttctttgtttgattgtagtgatcaaactcttcagcagagggtgatcgagacgtacatatctcgattataccagcctcatcttgtcaaggatagtatccagctgaaatatcaggaatctggtgttattgctttatgggaattcgctgaagcgcattcagagaagagattgggtgctatggttattgtgaagtcgttagaatctgtatcagcagcaattggagctgcactaaagggtacatcacgctatgcaagctctgagggtaacataatgcatattgctttattgggtgctgataatcaaatgcatggaactgaagacagtggtgataacgatcaagctcaagtcaggatagacaaactttctgcgacactggaacaaaatactgtcacagctgatctccgtgctgctggtgtgaaggttattagttgcattgttcaaagggatggagcactcatgcctatgcgccataccttcctcttgtcggatgaaaagctttgttatggggaagagccggttctccggcatgtggagcctcctctttctgctcttcttgagttgggtaagttgaaagtgaaaggatacaatgaggtgaagtatacaccgtcacgtgatcgtcagtggaacatatacacacttagaaatacagagaaccccaaaatgttgcacagggtgtttttccgaactcttgtcaggcaacccggtgcttccaacaaattcacatcaggcaacatcagtgatgttgaagtgggaggagctgaggaatctctttcatttacatcgagcagcatattaagatcgctgatgactgctatagaagagttggagcttcacgcgattaggacaggtcactctcatatgtttttgtgcatattgaaagagcgaaagcttcttgatcttgttcccgtttcagggaacaaagttgtggatattggccaagatgaagctactgcatgcttgcttctgaaagaaatggctctacagatacatgaacttgtgggtgcaaggatgcatcatctttctgtatgccaatgggaggtgaaacttaagttggacagcgatgggcctgccagtggtacctggagagttgtaacaaccaatgttactagtcacacctgcactgtggatatctaccgtgaggttgaagatacagaatcacagaaactagtataccactctgctccatcgtcatctggtcctttgcatggcgttgcactgaatactccatatcagcctttgagtgttattgatctgaaacgttgctccgctagaaacaacagaactacatactgctatgattttccgttggcatttgaaactgcagtgcagaagtcatggtctaacatttctagtgacaataaccgatgttatgttaaagcaacggagctggtgtttgctcacaagaatgggtcatggggcactcctgtaattcctatggagcgtcctgctgggctcaatgacattggtatggtagcttggatcttggacatgtccactcctgaatatcccaatggcaggcagattgttgtcatcgcaaatgatattacttttagagctggatcgtttggtccaagggaagatgcattttttgaaactgttaccaacctagcttgtgagaggaggcttcctctcatctacttggcagcaaactctggtgctcggatcggcatagcagatgaagtaaaatcttgcttccgtgttggatggtctgatgatggcagccctgaacgtgggtttcaatatatttatctgactgaagaagaccatgctcgtattagcgcttctgttatagcgcacaagatgcagcttgataatggtgaaattaggtgggttattgattctgttgtagggaaggaggatgggctaggtgtggagaacatacatggaagtgctgctattgccagtgcctattctagggcctatgaggagacatttacgcttacatttgtgactggaaggactgttggaataggagcatatcttgctcgacttggcatacggtgcattcagcgtactgaccagcccattatcctaactgggttttctgccttgaacaagcttcttggccgggaagtgtacagctcccacatgcagttgggtggccccaaaattatggcgacaaacggtgttgtccatctgacagtttcagatgaccttgaaggtgtatctaatatattgaggtggctcagctatgttcctgccaacattggtggacctcttcctattacaaaatctttggacccacctgacagacccgttgcttacatccctgagaatacatgcgatcctcgtgctgccatcagtggcattgatgatagccaagggaaatggttggggggcatgttcgacaaagacagttttgtggagacatttgaaggatgggcgaagtcagttgttactggcagagcgaaactcggagggattccggtgggtgttatagctgtggagacacagactatgatgcagctcatccctgctgatccaggccagcttgattcccatgagcgatctgttcctcgtgctgggcaagtctggtttccagattcagctactaagacagcgcaggcaatgctggacttcaaccgtgaaggattacctctgttcatccttgctaactggagaggcttctctggtggacaaagagatctttttgaaggaatccttcaggctgggtcaacaattgttgagaaccttagggcatacaatcagcctgcctttgtatatatccccaaggctgcagagctacgtggaggggcttgggtcgtgattgatagcaagataaatccagatcgcattgagttctatgctgagaggactgcaaagggcaatgttctcgaacctcaagggttgatcgagatcaagttcaggtcagaggaactccaagagtgcatgggtaggcttgatccagaattgataaatctgaaggcaaagctccagggagtaaagcatgaaaatggaagtctacctgagtcagaatcccttcagaagagcatagaagcccggaagaaacagttgttgcctttgtatactcaaattgcggtacggttcgctgaattgcatgacacttcccttagaatggctgctaagggtgtgattaagaaggttgtagactgggaagattctaggtcgttcttctacaagagattacggaggaggatatccgaggatgttcttgcgaaggaaattagaggtgtaagtggcaagcagttttctcaccaatcggcaatcgagctgatccagaaatggtacttggcctctaagggagctgaaacaggaagcactgaatgggatgatgacgatgcttttgttgcctggagggaaaaccctgaaaactaccaggagtatatcaaagaacccagggctcaaagggtatctcagttgctctcagatgttgcagactccagtccagatctagaagccttgccacagggtctttctatgctactagagaagatggatcctgcaaagagggaaattgttgaagactttgaaataaaccttgtaaagtaa

SEQ ID NO: 55 - protein, 2235 aa, Saccharomyces cerevisiae
MEFSEESLFESSPQKMEYEITNYSERHTELPGHFIGLNTVDKLEESPLRDFVKSHGGHTVISKILIANNGIAAVKEIRSVRKWAYETFGDDRTVQFVAMATPEDLEANAEYIRMADQYIEVPGGTNNNNYANVDLIVDIAERADVDAVWAGWGHASENPLLPEKLSQSKRKVIFIGPPGNAMRSLGDKISSTIVAQSAKVPCIPWSGTGVDTVHVDEKTGLVSVDDDIYQKGCCTSPEDGLQKAKRIGFPVMIKASEGGGGKGIRQVEREEDFIALYHQAANEIPGSPIFIMKLAGRARHLEVQLLADQYGTNISLFGRDCSVQRRHQKIIEEAPVTIAKAETFHEMEKAAVRLGKLVGYVSAGTVEYLYSHDDGKFYFLELNPRLQVEHPTTEMVSGVNLPAAQLQIAMGIPMHRISDIRTLYGMNPHSASEIDFEFKTQDATKKQRRPIPKGHCTACRITSEDPNDGFKPSGGTLHELNFRSSSNVWGYFSVGNNGNIHSFSDSQFGHIFAFGENRQASRKHMVVALKELSIRGDFRTTVEYLIKLLETEDFEDNTITTGWLDDLITHKMTAEKPDPTLAVICGAATKAFLASEEARHKYIESLQKGQVLSKDLLQTMFPVDFIHEGKRYKFTVAKSGNDRYTLFINGSKCDIILRQLSDGGLLIAIGGKSHTIYWKEEVAATRLSVDSMTTLLEVENDPTQLRTPSPGKLVKFLVENGEHIIKGQPYAEIEVMKMQMPLVSQENGIVQLLKQPGSTIVAGDIMAIMTLDDPSKVKHALPFEGMLPDFGSPVIEGTKPAYKFKSLVSTLENILKGYDNQVIMNASLQQLIEVLRNPKLPYSEWKLHISALHSRLPAKLDEQMEELVARSLRRGAVFPARQLSKLIDMAVKNPEYNPDKLLGAVVEPLADIAHKYSNGLEAHEHSIFVHFLEEYYEVEKLFNGPNVREENIILKLRDENPKDLDKVALTVLSHSKVSAKNNLILAILKHYQPLCKLSSKVSAIFSTPLQHIVELESKATAKVALQAREILIQGALPSVKERTEQIEHILKSSVVKVAYGSSNPKRSEPDLNILKDLIDSNYVVFDVLLQFLTHQDPVVTAAAAQVYIRRAYRAYTIGDIRVHEGVTVPIVEWKFQLPSAAFSTFPTVKSKMGMNRAVSVSDLSYVANSQSSPLREGILMAVDHLDDVDEILSQSLEVIPRHQSSSNGPAPDRSGSSASLSNVANVCVASTEGFESEEEILVRLREILDLNKQELINASIRRITFMFGFKDGSYPKYYTFNGPNYNENETIRHIEPALAFQLELGRLSNFNIKPIFTDNRNIHVYEAVSKTSPLDKRFFTRGIIRTGHIRDDISIQEYLTSEANRLMSDILDNLEVTDTSNSDLNHIFINFIAVFDISPEDVEAAFGGFLERFGKRLLRLRVSSAEIRIIIKDPQTGAPVPLRALINNVSGYVIKTEMYTEVKNAKGEWVFKSLGKPGSMHLRPIATPYPVKEWLQPKRYKAHLMGTTYVYDFPELFRQASSSQWKNFSADVKLTDDFFISNELIEDENGELTEVEREPGANAIGMVAFKITVKTPEYPRGRQFVVVANDITFKIGSFGPQEDEFFNKVTEYARKRGIPRIYLAANSGARIGMAEEIVPLFQVAWNDAANPDKGFQYLYLTSEGMETLKKFDKENSVLTERTVINGEERFVIKTIIGSEDGLGVECLRGSGLIAGATSRAYHDIFTITLVTCRSVGIGAYLVRLGQRAIQVEGQPIILTGAPAINKMLGREVYTSNLQLGGTQIMYNNGVSHLTAVDDLAGVEKIVEWMSYVPAKRNMPVPILETKDTWDRPVDFTPTNDETYDVRWMIEGRETESGFEYGLFDKGSFFETLSGWAKGVVVGRARLGGIPLGVIGVETRTVENLIPADPANPNSAETLIQEPGQVWHPNSAFKTAQAINDFNNGEQLPMMILANWRGFSGGQRDMFNEVLKYGSFIVDALVDYKQPIIIYIPPTGELRGGSWVVVDPTINADQMEMYADVNARAGVLEPQGMVGIKFRREKLLDTMNRLDDKYRELRSQLSNKSLAPEVHQQISKQLADRERELLPIYGQISLQFADLHDRSSRMVAKGVISKELEWTEARRFFFWRLRRRLNEEYLIKRLSHQVGEASRLEKIARIRSWYPASVDHEDDRQVATWIEENYKTLDDKLKGLKLESFAQDLAKKIRSDHDNAIDGLSEVIKMLSTDDKEKLLKTLK

SEQ ID NO: 56 - DNA, 6708 bp, Artificial Sequence
  Codon-optimized S. cerevisiae acetyl Coa carboxylase (ACC1)
atggaattctccgaggaaagtttgttcgaaagcagtccgcagaaaatggaatatgaaattacgaattattcggaacgccacacggagctccccgggcacttcatcggactcaacaccgtggataagctcgaagaaagtcccctccgcgattttgtgaaaagccacggcggccataccgtgatctcgaagattctgattgccaataacggaattgccgctgtcaaggagatccgcagcgtccggaagtgggcgtacgaaacttttggcgatgaccgtacagtccagtttgttgctatggcgactccggaagacttggaggcgaatgcggaatacattcgaatggccgatcaatacatcgaagtccccggaggaacgaacaacaacaattatgcgaacgtcgatttgatcgtggatatcgcagaacgcgcggacgtggatgctgtttgggccggatggggccacgcttcggaaaaccctctgttgccggaaaaactcagccagtctaaacggaaagtcattttcatcggccctccgggcaacgcaatgcgctcgttgggtgataagatcagctcgaccattgtggctcagagcgctaaagtcccatgtattccctggtcgggtaccggcgtggatacggtccatgttgatgagaaaactggactggtcagcgtcgatgatgatatctaccaaaagggctgttgcaccagcccggaagatggcctgcaaaaggcgaagcgcatcgggttcccagtcatgatcaaggcatccgaaggcggaggcggtaagggtatccgccaggttgagcgtgaagaagattttatcgcactgtatcatcaagcggctaacgaaatcccgggctcgccaattttcattatgaaactggctggtcgggcgcgtcatctcgaagtgcaactcctcgctgaccagtacggtacgaacatctctttgttcggtcgggattgttcggtccagcgtcgtcaccagaagatcattgaagaagcccctgttaccatcgcaaaggccgagacgtttcatgagatggagaaagcggccgtccgcctcggcaagctggtcggttacgttagcgcaggcaccgtggaatacctctattcccacgacgatggtaagttttactttctcgaactgaatcctcgcctgcaggttgaacacccgaccacagagatggtgtcgggggtcaatctgccggctgcgcagttgcagattgcaatgggcattccgatgcatcgaatcagcgacatccgaaccctgtacggcatgaacccgcacagtgcgagcgaaatcgactttgagttcaagacccaagacgccacgaagaaacagcgacgcccaattccgaagggccattgcaccgcgtgtcgcattacctcggaggaccccaatgatggttttaagccctcgggcggtactctgcacgagctcaacttccgctcctcctcgaacgtctggggctatttcagcgtcggaaataatggtaacattcatagtttttccgattcccaatttggccatatcttcgcctttggcgaaaaccgacaagctagccgcaaacacatggtcgtggcgttgaaggagctgagtatccgaggggactttcgcacgacggtggaatatctgatcaaactgctcgaaacggaggactttgaggataacacaattaccaccggatggttggacgacctgattacgcacaaaatgaccgccgagaaacccgaccccaccttggcagtgatttgtggcgcggcaacgaaggcctttttggcctctgaagaggcacgccacaagtacattgagagtctccaaaagggtcaggtgctgagtaaagatctgctgcaaaccatgtttcctgtcgactttattcatgaggggaaacgctacaaattcacggttgctaagtctggtaatgatcggtacacattgtttatcaatggatcgaagtgcgatattatcttgcgacaactctccgacggcggcctcctgattgctatcggcgggaaaagtcataccatctattggaaagaagaggtcgccgccacccgactgagcgttgattcgatgactactctgctcgaagttgaaaacgatccaacgcaactgcgcactccctctccgggtaagctcgtgaagtttctcgtcgagaatggcgaacacattattaagggccagccgtatgcggaaatcgaggtgatgaagatgcagatgcccctggtcagccaagagaacggtattgtgcaactgctgaaacagcccggcagcaccatcgtcgctggcgatatcatggctatcatgaccctcgatgatccttccaaagtcaaacatgccctgcccttcgaaggcatgctccccgattttggctcccccgtgattgagggcaccaaaccagcttacaagtttaaatcgctggtttccaccctcgagaacatcttgaagggctacgataatcaggtcattatgaatgccagcctccagcagctcattgaggtcctccgtaaccccaagctgccctacagtgaatggaagctccacatcagtgcgctccactcgcgactgcccgcgaagctcgatgagcagatggaagagctcgtcgctcgcagcctgcgtcgcggcgcagtctttccggcacggcaactgtcgaagctcatcgatatggctgtcaaaaaccccgaatacaaccccgataaactcttgggtgctgtcgttgagccgctcgccgatatcgcgcacaagtacagtaatggcctggaggcgcacgaacacagtatctttgttcacttcctggaagaatactatgaggttgagaaactgttcaatgggcctaatgtccgggaagagaatattatcctgaagctccgtgatgaaaatccgaaagatttggataaagtcgccttgacggtgctcagtcatagcaaggtgagtgccaagaacaatctcatcctggcgatcttgaaacactaccaacctttgtgcaagctgagttccaaggtgtcggctatttttagtacgcccctgcagcacatcgtggaactcgaaagtaaagccaccgccaaggtggctctgcaggcccgggagattctgatccagggtgctctgccgagcgtgaaagagcggacggaacaaatcgaacacatcctgaagagttcggtcgtgaaggttgcatatggcagcagtaaccctaaacgctcggaaccggacctcaatatcctgaaggatctgatcgatagtaattatgttgtttttgatgtcctgctccaatttctgactcaccaagatccggttgttactgcggctgccgcgcaagtttacattcgacgcgcctatcgcgcctacacaatcggcgatattcgagtccatgagggcgtgaccgttccaatcgttgaatggaaattccagttgccatcggcggctttttctacattcccaacagtcaagagtaagatgggcatgaatcgtgccgtttcggtcagtgatttgtcctatgtcgcaaactcgcaatctagtcctctgcgagagggcatcctgatggcagtggatcatttggatgatgtcgatgagatcctctcgcaaagtctcgaggtcattcctcgccaccaatcgtcgtccaatggcccagctcccgatcgatccggttcttccgccagcttgtcgaatgtcgccaacgtctgtgtggcgtcgactgaggggttcgaaagcgaagaagaaattttggtccgcttgcgggaaattttggacctcaacaagcaggaactgattaatgcctctattcgccgcattacgtttatgttcggtttcaaggatggctcgtacccaaaatactatacgttcaacggcccgaactacaatgagaacgagactatccgacatattgaacctgccctcgctttccaactggaactggggcggctctcgaatttcaatattaagcctatttttaccgacaaccgtaacatccacgtttacgaggctgtcagcaaaacaagcccgctggataagcgattcttcacccggggcattatccgcacaggccacatccgtgacgatatcagtatccaagaatacctgactagcgaagctaaccgcttgatgagcgacattttggataatctggaagtgactgatacttccaacagcgacttgaatcacatttttatcaacttcattgccgtgttcgatatctcgccggaagatgtggaagccgcgtttggaggctttctggaacggtttggcaaacggctgctgcgcttgcgggtgtctagcgcggagattcggattatcatcaaagatccgcaaacgggggctcctgtgccactgcgcgcgctgattaataacgtctcgggttacgtgatcaagaccgagatgtacacagaggttaaaaacgctaaaggcgagtgggtcttcaagagcttgggcaaacccggcagcatgcatctccgccccatcgccacgccgtatccggtcaaggagtggctgcagcccaagcgatacaaggcgcacttgatggggacgacatatgtttacgattttcctgaactgttccgtcaagcaagcagctcccagtggaaaaacttttccgcagatgtgaaattgactgatgatttcttcatctcgaatgagctcatcgaagatgagaatggcgagctgaccgaagttgagcgagaacctggtgccaatgcgattgggatggtcgcctttaaaatcacggtcaaaactcccgagtaccctcggggtcgccagttcgtcgttgtggctaacgatatcacctttaagattggatcgtttggcccgcaggaggatgagttctttaacaaggtcactgaatacgcccgaaaacgaggcattccgcggatttacttggcagccaatagcggtgcgcgcatcggcatggctgaagaaatcgttccgctgtttcaggttgcctggaacgacgcggccaaccccgacaaggggttccagtacttgtatctgacttccgaaggcatggagacgttgaagaaatttgataaggagaatagtgtcttgactgagcggaccgttattaacggcgaggagcggtttgtcattaagactatcatcggcagcgaagatggcctcggcgtcgaatgtttgcgcgggtccggcctgatcgcaggggcaacctcgcgagcctatcacgatatctttaccattactttggtcacgtgtcgttcggttggcattggagcatacctcgtgcgcctcggtcagcgcgccatccaagtggaaggccaacctatcattttgactggcgcgcctgctatcaataagatgctgggccgtgaagtctacacatcgaacctccaactgggcggtacccaaattatgtataacaatggcgtcagccatctgacagccgtcgatgacctggctggcgttgaaaagattgttgagtggatgagctatgtgcccgccaaacggaacatgccagtccccattttggaaaccaaggatacctgggatcgcccagtggatttcactccgactaatgatgaaacctacgatgtccgctggatgatcgaagggcgcgaaactgagtcgggcttcgagtacggactgtttgataagggtagtttctttgagactctcagtggttgggccaaaggcgttgtcgtcggtcgggcacgtctgggcggcatcccgctgggagttattggtgttgagacacgtacggtggaaaatctgatcccggctgatccggccaaccccaatagtgcggaaacgctgattcaagagcccgggcaagtgtggcacccgaatagtgcctttaagacggcgcaggctattaatgattttaacaacggcgaacaactgcctatgatgattctggcgaattggcgggggtttagtggtgggcagcgcgacatgttcaacgaagtgctcaagtacggctccttcatcgtggacgccctggtcgactataaacaaccaattatcatctatattccccctaccggcgagctgcgaggcggtagctgggtcgtggtggaccctactattaatgcagatcaaatggagatgtacgccgacgtgaatgctcgagcgggcgtgctggaaccacaagggatggttggcatcaaattccgccgcgaaaaactgttggatactatgaatcgactggatgataaatatcgcgagctgcgcagccaactgtcgaacaagtctctggccccggaagtccatcaacagatttctaaacagctggcagatcgcgaacgtgaactcttgccgatctacggccaaatcagcctccaatttgccgacctgcatgatcgcagcagccgcatggttgcgaaaggtgtcatcagcaaagagctcgagtggacggaagctcggcggtttttcttttggcggctgcgccgacgcctgaatgaagaatacttgattaagcgtctgagccaccaggtcggcgaggctagtcggttggaaaagatcgcccgcattcggagttggtatccggcatcggttgaccacgaggacgatcgccaggtcgctacctggatcgaagagaactacaaaaccttggatgataagctgaaaggactgaagctggagtctttcgcccaagatctcgccaagaagatccgtagcgatcatgacaatgcaatcgacggtttgagcgaggttatcaagatgttgtctaccgacgacaaggagaagctgctcaaaacgctgaagtag

SEQ ID NO: 57 - DNA, 6702 bp, Artificial Sequence
  Synthetic construct Saccharomyces cerevisiae clone FLH148869.01X ACC1
atgagcgaagaaagcttattcgagtcttctccacagaagatggagtacgaaattacaaactactcagaaagacatacagaacttccaggtcatttcattggcctcaatacagtagataaactagaggagtccccgttaagggactttgttaagagtcacggtggtcacacggtcatatccaagatcctgatagcaaataatggtattgccgccgtgaaagaaattagatccgtcagaaaatgggcatacgagacgttcggcgatgacagaaccgtccaattcgtcgccatggccaccccagaagatctggaggccaacgcagaatatatccgtatggccgatcaatacattgaagtgccaggtggtactaataataacaactacgctaacgtagacttgatcgtagacatcgccgaaagagcagacgtagacgccgtatgggctggctggggtcacgcctccgagaatccactattgcctgaaaaattgtcccagtctaagaggaaagtcatctttattgggcctccaggtaacgccatgaggtctttaggtgataaaatctcctctaccattgtcgctcaaagtgctaaagtcccatgtattccatggtctggtaccggtgttgacaccgttcacgtggacgagaaaaccggtctggtctctgtcgacgatgacatctatcaaaagggttgttgtacctctcctgaagatggtttacaaaaggccaagcgtattggttttcctgtcatgattaaggcatccgaaggtggtggtggtaaaggtatcagacaagttgaacgtgaagaagatttcatcgctttataccaccaggcagccaacgaaattccaggctcccccattttcatcatgaagttggccggtagagcgcgtcacttggaagttcaactgctagcagatcagtacggtacaaatatttccttgttcggtagagactgttccgttcagagacgtcatcaaaaaattatcgaagaagcaccagttacaattgccaaggctgaaacatttcacgagatggaaaaggctgccgtcagactggggaaactagtcggttatgtctctgccggtaccgtggagtatctatattctcatgatgatggaaaattctactttttagaattgaacccaagattacaagtcgagcatccaacaacggaaatggtctccggtgttaacttacctgcagctcaattacaaatcgctatgggtatccctatgcatagaataagtgacattagaactttatatggtatgaatcctcattctgcctcagaaatcgatttcgaattcaaaactcaagatgccaccaagaaacaaagaagacctattccaaagggtcattgtaccgcttgtcgtatcacatcagaagatccaaacgatggattcaagccatcgggtggtactttgcatgaactaaacttccgttcttcctctaatgtttggggttacttctccgtgggtaacaatggtaatattcactccttttcggactctcagttcggccatatttttgcttttggtgaaaatagacaagcttccaggaaacacatggttgttgccctgaaggaattgtccattaggggtgatttcagaactactgtggaatacttgatcaaacttttggaaactgaagatttcgaggataacactattaccaccggttggttggacgatttgattactcataaaatgaccgctgaaaagcctgatccaactcttgccgtcatttgcggtgccgctacaaaggctttcttagcatctgaagaagcccgccacaagtatatcgaatccttacaaaagggacaagttctatctaaagacctactgcaaactatgttccctgtagattttatccatgagggtaaaagatacaagttcaccgtagctaaatccggtaatgaccgttacacattatttatcaatggttctaaatgtgatatcatactgcgtcaactatctgatggtggtcttttgattgccataggcggtaaatcgcataccatctattggaaagaagaagttgctgctacaagattatccgttgactctatgactactttgttggaagttgaaaacgatccaacccagttgcgtactccatcccctggtaaattggttaaattcttggtggaaaatggtgaacacattatcaagggccaaccatatgcagaaattgaagttatgaaaatgcaaatgcctttggtttctcaagaaaatggtatcgtccagttattaaagcaacctggttctaccattgttgcaggtgatatcatggctattatgactcttgacgatccatccaaggtcaagcacgctctaccatttgaaggtatgctgccagattttggttctccagttatcgaaggaaccaaacctgcctataaattcaagtcattagtgtctactttggaaaacattttgaagggttatgacaaccaagttattatgaacgcttccttgcaacaattgatagaggttttgagaaatccaaaactgccttactcagaatggaaactacacatctctgctttacattcaagattgcctgctaagctagatgaacaaatggaagagttagttgcacgttctttgagacgtggtgctgttttcccagctagacaattaagtaaattgattgatatggccgtgaagaatcctgaatacaaccccgacaaattgctgggcgccgtcgtggaaccattggcggatattgctcataagtactctaacgggttagaagcccatgaacattctatatttgtccatttcttggaagaatattacgaagttgaaaagttattcaatggtccaaatgttcgtgaggaaaatatcattctgaaattgcgtgatgaaaaccctaaagatctagataaagttgcgctaactgttttgtctcattcgaaagtttcagcgaagaataacctgatcctagctatcttgaaacattatcaaccattgtgcaagttatcttctaaagtttctgccattttctctactcctctacaacatattgttgaactagaatctaaggctaccgctaaggtcgctctacaagcaagagaaattttgattcaaggcgctttaccttcggtcaaggaaagaactgaacaaattgaacatatcttaaaatcctctgttgtgaaggttgcctatggctcatccaatccaaagcgctctgaaccagatttgaatatcttgaaggacttgatcgattctaattacgttgtgttcgatgttttacttcaattcctaacccatcaagacccagttgtgactgctgcagctgctcaagtctatattcgtcgtgcttatcgtgcttacaccataggagatattagagttcacgaaggtgtcacagttccaattgttgaatggaaattccaactaccttcagctgcgttctccacctttccaactgttaaatctaaaatgggtatgaacagggctgtttctgtttcagatttgtcatatgttgcaaacagtcagtcatctccgttaagagaaggtattttgatggctgtggatcatttagatgatgttgatgaaattttgtcacaaagtttggaagttattcctcgtcaccaatcttcttctaacggacctgctcctgatcgttctggtagctccgcatcgttgagtaatgttgctaatgtttgtgttgcttctacagaaggtttcgaatctgaagaggaaattttggtaaggttgagagaaattttggatttgaataagcaggaattaatcaatgcttctatccgtcgtatcacatttatgttcggttttaaagatgggtcttatccaaagtattatacttttaacggtccaaattataacgaaaatgaaacaattcgtcacattgagccggctttggccttccaactggaattaggaagattgtccaacttcaacattaaaccaattttcactgataatagaaacatccatgtctacgaagctgttagtaagacttctccattggataagagattctttacaagaggtattattagaacgggtcatatccgtgatgacatttctattcaagaatatctgacttctgaagctaacagattgatgagtgatatattggataatttagaagtcaccgacacttcaaattctgatttgaatcatatcttcatcaacttcattgcggtgtttgatatctctccagaagatgtcgaagccgccttcggtggtttcttagaaagatttggtaagagattgttgagattgcgtgtttcttctgccgaaattagaatcatcatcaaagatcctcaaacaggtgccccagtaccattgcgtgccttgatcaataacgtttctggttatgttatcaaaacagaaatgtacaccgaagtcaagaacgcaaaaggtgaatgggtatttaagtctttgggtaaacctggatccatgcatttaagacctattgctactccttaccctgttaaggaatggttgcaaccaaaacgttataaggcacacttgatgggtaccacatatgtctatgacttcccagaattattccgccaagcatcgtcatcccaatggaaaaatttctctgcagatgttaagttaacagatgatttctttatttccaacgagttgattgaagatgaaaacggcgaattaactgaggtggaaagagaacctggtgccaacgctattggtatggttgcctttaagattactgtaaagactcctgaatatccaagaggccgtcaatttgttgttgttgctaacgatatcacattcaagatcggttcctttggtccacaagaagacgaattcttcaataaggttactgaatatgctagaaagcgtggtatcccaagaatttacttggctgcaaactcaggtgccagaattggtatggctgaagagattgttccactatttcaagttgcatggaatgatgctgccaatccggacaagggcttccaatacttatacttaacaagtgaaggtatggaaactttaaagaaatttgacaaagaaaattctgttctcactgaacgtactgttataaacggtgaagaaagatttgtcatcaagacaattattggttctgaagatgggttaggtgtcgaatgtctacgtggatctggtttaattgctggtgcaacgtcaagggcttaccacgatatcttcactatcaccttagtcacttgtagatccgtcggtatcggtgcttatttggttcgtttgggtcaaagagctattcaggtcgaaggccagccaattattttaactggtgctcctgcaatcaacaaaatgctgggtagagaagtttatacttctaacttacaattgggtggtactcaaatcatgtataacaacggtgtttcacatttgactgctgttgacgatttagctggtgtagagaagattgttgaatggatgtcttatgttccagccaagcgtaatatgccagttcctatcttggaaactaaagacacatgggatagaccagttgatttcactccaactaatgatgaaacttacgatgtaagatggatgattgaaggtcgtgagactgaaagtggatttgaatatggtttgtttgataaagggtctttctttgaaactttgtcaggatgggccaaaggtgttgtcgttggtagagcccgtcttggtggtattccactgggtgttattggtgttgaaacaagaactgtcgagaacttgattcctgctgatccagctaatccaaatagtgctgaaacattaattcaagaacctggtcaagtttggcatccaaactccgccttcaagactgctcaagctatcaatgactttaacaacggtgaacaattgccaatgatgattttggccaactggagaggtttctctggtggtcaacgtgatatgttcaacgaagtcttgaagtatggttcgtttattgttgacgcattggtggattacaaacaaccaattattatctatatcccacctaccggtgaactaagaggtggttcatgggttgttgtcgatccaactatcaacgctgaccaaatggaaatgtatgccgacgtcaacgctagagctggtgttttggaaccacaaggtatggttggtatcaagttccgtagagaaaaattgctggacaccatgaacagattggatgacaagtacagagaattgagatctcaattatccaacaagagtttggctccagaagtacatcagcaaatatccaagcaattagctgatcgtgagagagaactattgccaatttacggacaaatcagtcttcaatttgctgatttgcacgataggtcttcacgtatggtggccaagggtgttatttctaaggaactggaatggaccgaggcacgtcgtttcttcttctggagattgagaagaagattgaacgaagaatatttgattaaaaggttgagccatcaggtaggcgaagcatcaagattagaaaagatcgcaagaattagatcgtggtaccctgcttcagtggaccatgaagatgataggcaagtcgcaacatggattgaagaaaactacaaaactttggacgataaactaaagggtttgaaattagagtcattcgctcaagacttagctaaaaagatcagaagcgaccatgacaatgctattgatggattatctgaagttatcaagatgttatctaccgatgataaagaaaaattgttgaagactttgaaatag

SEQ ID NO: 58 - protein, 458 aa, Acinetobacter baylii sp.
MRPLHPIDFIFLSLEKRQQPMHVGGLFLFQIPDNAPDTFIQDLVNDIRISKSIPVPPFNNKLNGLFWDEDEEFDLDHHFRHIALPHPGRIRELLIYISQEHSTLLDRAKPLWTCNIIEGIEGNRFAMYFKIHHAMVDGVAGMRLIEKSLSHDVTEKSIVPPWCVEGKRAKRLREPKTGKIKKIMSGIKSQLQATPTVIQELSQTVFKDIGRNPDHVSSFQAPCSILNQRVSSSRRFAAQSFDLDRFRNIAKSLNVTINDVVLAVCSGALRAYLMSHNSLPSKPLIAMVPASIRNDDSDVSNRITMILANLATHKDDPLQRLEIIRRSVQNSKQRFKRMTSDQILNYSAVVYGPAGLNIISGMMPKRQAFNLVISNVPGPREPLYWNGAKLDALYPASIVLDGQALNITMTSYLDKLEVGLIACRNALPRMQNLLTHLEEEIQLFEGVIAKQEDIKTAN

SEQ ID NO: 59 - protein, 446 aa, Streptomyces coelicolor
MTPDPLAPLDLAFWNIESAEHPMHLGALGVFEADSPTAGALAADLLAARAPAVPGLRMRIRDTWQPPMALRRPFAFGGATREPDPRFDPLDHVRLHAPATDFHARAGRLMERPLERGRPPWEAHVLPGADGGSFAVLFKFHHALADGLRALTLAAGVLDPMDLPAPRPRPEQPPRGLLPDVRALPDRLRGALSDAGRALDIGAAAALSTLDVRSSPALTAASSGTRRTAGVSVDLDDVHHVRKTTGGTVNDVLIAVVAGALRRWLDERGDGSEGVAPRALIPVSRRRPRSAHPQGNRLSGYLMRLPVGDPDPLARLGTVRAAMDRNKDAGPGRGAGAVALLADHVPALGHRLGGPLVSGAARLWFDLLVTSVPLPSLGLRLGGHPLTEVYPLAPLARGHSLAVAVSTYRGRVHYGLLADAKAVPDLDRLAVAVAEEVETLLTACRP

SEQ ID NO: 60 - protein, 457 aa, Alcanivorax borkumensis
MKALSPVDQLFLWLEKRQQPMHVGGLQLFSFPEGAGPKYVSELAQQMRDYCHPVAPFNQRLTRRLGQYYWTRDKQFDIDHHFRHEALPKPGRIRELLSLVSAEHSNLLDRERPMWEAHLIEGIRGRQFALYYKIHHSVMDGISAMRIASKTLSTDPSEREMAPAWAFNTKKRSRSLPSNPVDMASSMARLTASISKQAATVPGLAREVYKVTQKAKKDENYVSIFQAPDTILNNTITGSRRFAAQSFPLPRLKVIAKAYNCTINTVVLSMCGHALREYLISQHALPDEPLIAMVPMSLRQDDSTGGNQIGMILANLGTHICDPANRLRVIHDSVEEAKSRFSQMSPEEILNFTALTMAPTGLNLLTGLAPKWRAFNVVISNIPGPKEPLYWNGAQLQGVYPVSIALDRIALNITLTSYVDQMEFGLIACRRTLPSMQRLLDYLEQSIRELEIGAGIK

SEQ ID NO: 61 - protein, 460 aa, Acinetobacter baylii sp.
MEFRPLHPIDFIFLSLEKRQQPMHVGGLFLFQIPDNAPDTFIQDLVNDIRISKSIPVPPFNNKLNGLFWDEDEEFDLDHHFRHIALPHPGRIRELLIYISQEHSTLLDRAKPLWTCNIIEGIEGNRFAMYFKIHHAMVDGVAGMRLIEKSLSHDVTEKSIVPPWCVEGKRAKRLREPKTGKIKKIMSGIKSQLQATPTVIQELSQTVFKDIGRNPDHVSSFQAPCSILNQRVSSSRRFAAQSFDLDRFRNIAKSLNVTINDVVLAVCSGALRAYLMSHNSLPSKPLIAMVPASIRNDDSDVSNRITMILANLATHKDDPLQRLEIIRRSVQNSKQRFKRMTSDQILNYSAVVYGPAGLNIISGMMPKRQAFNLVISNVPGPREPLYWNGAKLDALYPASIVLDGQALNITMTSYLDKLEVGLIACRNALPRMQNLLTHLEEEIQLFEGVIAKQEDIKTAN

SEQ ID NO: 62 - DNA, 1377 bp, Artificial Sequence
  Codon-optimized Acinetobacter baylii sp. atfA
atgcggcccttgcaccccattgacttcatctttctgagtttggagaaacggcaacagcccatgcatgtcggtggcttgtttctcttccaaatccccgataacgccccggacacctttattcaggatctggtcaatgatatccggatctcgaaatcgatccccgtgccgccgtttaataataaactgaacggcctcttttgggacgaagacgaggaatttgatctggatcaccattttcggcacatcgctttgccccacccgggtcggattcgcgaactcctgatctatattagccaagaacacagcacgttgttggaccgggccaaaccgctctggacgtgcaatatcatcgaaggcatcgaaggcaaccgctttgcgatgtacttcaagattcatcacgcgatggttgacggtgtcgctggcatgcgcctgatcgaaaaatcgctgagccatgatgtgaccgaaaagagtatcgtccccccctggtgcgtggaaggtaagcgcgccaagcgcctccgcgaaccgaaaacgggcaagattaagaaaatcatgagcggtatcaagtcgcagctgcaggctaccccgaccgtgatccaggagctgtcgcaaaccgtgtttaaggatattggtcggaacccggatcatgtcagtagtttccaagctccctgttcgatcttgaatcagcgcgttagcagcagccgccggttcgctgctcaaagttttgatctcgatcggtttcggaatattgccaagtcgctgaacgtcaccatcaatgatgtggttctcgcggtttgttcgggtgccctccgcgcgtatctgatgagccataacagtctccccagtaagccgctgattgctatggttcccgcgtcgattcggaatgacgacagcgatgtgagcaaccggattaccatgatcctggctaacctcgcgacccacaaagatgatccgttgcaacgcctggagattatccgccgcagtgtgcagaacagtaaacagcgcttcaaacggatgaccagtgatcaaattctgaattacagcgctgtggtctatggtcccgccggcttgaatattatcagtggtatgatgcccaaacgccaagcgtttaacttggtgatcagtaatgtgccgggtccgcgcgaacccttgtattggaacggtgctaaactcgatgccctctaccccgccagtatcgtgctcgatggccaggctctcaatattaccatgaccagctatctcgataaactcgaggtgggtttgattgcgtgccgcaacgcgctgccccgcatgcagaacttgctgacccacctggaagaggaaatccagctcttcgagggcgtgattgcgaagcaggaagatattaaaacggccaactag

SEQ ID NO: 63 - DNA, 1376 bp, Acinetobacter sp.
atgcgcccattacatccgattgattttatattcctgtcactagaaaaaagacaacagcctatgcatgtaggtggtttatttttgtttcagattcctgataacgccccagacacctttattcaagatctggtgaatgatatccggatatcaaaatcaatccctgttccaccattcaacaataaactgaatgggcttttttgggatgaagatgaagagtttgatttagatcatcattttcgtcatattgcactgcctcatcctggtcgtattcgtgaattgcttatttatatttcacaagagcacagtacgctgctagatcgggcaaagcccttgtggacctgcaatattattgaaggaattgaaggcaatcgttttgccatgtacttcaaaattcaccatgcgatggtcgatggcgttgctggtatgcggttaattgaaaaatcactctcccatgatgtaacagaaaaaagtatcgtgccaccttggtgtgttgagggaaaacgtgcaaagcgcttaagagaacctaaaacaggtaaaattaagaaaatcatgtctggtattaagagtcagcttcaggcgacacccacagtcattcaagagctttctcagacagtatttaaagatattggacgtaatcctgatcatgtttcaagctttcaggcgccttgttctattttgaatcagcgtgtgagctcatcgcgacgttttgcagcacagtcttttgacctagatcgttttcgtaatattgccaaatcgttgaatgtgaccattaatgatgttgtactagcggtatgttctggtgcattacgtgcgtatttgatgagtcataatagtttgccttcaaaaccattaattgccatggttccagcctctattcgcaatgacgattcagatgtcagcaaccgtattacgatgattctggcaaatttggcaacccacaaagatgatcctttacaacgtcttgaaattatccgccgtagtgttcaaaactcaaagcaacgcttcaaacgtatgaccagcgatcagattctaaattatagtgctgtcgtatatggccctgcaggactcaacataatttctggcatgatgccaaaacgccaagccttcaatctggttatttccaatgtgcctggcccaagagagccactttactggaatggtgccaaacttgatgcactctacccagcttcaattgtattagacggtcaagcattgaatattacaatgaccagttatttagataaacttgaagttggtttgattgcatgccgtaatgcattgccaagaatgcagaatttactgacacatttagaagaagaaattcaactatttgaaggcgtaattgcaaagcaggaagatattaaaacagccaatta

SEQ ID NO: 64 - DNA, 1341 bp, Artificial Sequence
  Codon-optimized Streptomyces coelicolor DGAT
atgacgcctgacccgttggctcccttggacttggctttctggaatatcgaaagtgccgagcacccgatgcacttgggggcactgggggtctttgaggcggatagtccaaccgctggtgcactcgccgcggatctcctggctgcccgcgctcccgcagtgcccgggctgcgcatgcggattcgcgatacatggcagccgcctatggcgctccgtcgcccttttgcttttggcggtgctacacgcgagcccgacccgcggtttgatccactcgatcatgtgcggctccatgccccagcgacggatttccacgcacgcgcaggtcggttgatggagcgccctctggaacgaggccgtcctccttgggaagcccatgtcctgccaggggctgacggtggatcgtttgcggtcttgtttaagttccatcatgccctggccgacggtctgcgggcgctgacgctggcggcgggcgtgctcgatccgatggatctccccgctccacggccccgcccagagcagcccccccgtggtctcctgccggatgtccgcgcgctgccggatcggctgcgaggggctctgtctgacgcgggccgcgcgttggacatcggcgccgccgcagccctcagcaccctggatgtgcggagcagtcccgctctgactgcggcgtcctcgggcacgcgacgtaccgccggcgtgtccgtggatctcgacgacgtgcaccatgttcgcaaaacgacaggcggtaccgttaacgatgttttgatcgccgttgttgccggggccctgcgacgctggctggatgaacgaggcgatgggtcggaaggcgtcgccccgcgcgccctcattcccgtcagccggcggcgacctcggagcgcacacccgcaaggcaaccgattgagtggctacctgatgcgcttgccggtcggcgacccggaccctctcgcacggttgggaaccgtccgtgccgcgatggatcgaaataaggatgcggggcccggccgcggagctggcgcagttgctctcttggcagaccacgttcctgccctgggccaccgcctgggtggacccctcgtctcgggcgctgctcgactgtggttcgatctgttggtcacgagcgtcccgttgccctctttgggtttgcgcctcggtgggcatccgctgaccgaagtgtacccactggcccccctggcccgtggccactccttggcggtggcggtgagcacttatcgcggtcgggttcattacggtctcctcgctgatgctaaagccgttcctgatctggatcgtctggcagtggccgtcgccgaggaggttgaaaccttgctcactgcgtgccgcccctag

SEQ ID NO: 65 - DNA, 1374 bp, Artificial Sequence
  Codon-optimized Alcanivorax borkumensis DGAT
atgaaagctttgagccccgttgatcagctgtttctgtggttggaaaaacggcagcaacccatgcatgtgggtgggttgcagctgttctcctttcccgaaggcgcggggccgaaatatgtctcggaactggcccaacagatgcgcgattattgtcaccctgtcgccccgttcaaccaacgtctgacacggcgcctggggcaatactactggacacgtgataagcaatttgacattgaccatcattttcggcacgaggccctgcccaaaccgggtcggattcgcgagttgctcagcttggtgagtgcggaacactccaacttgttggatcgtgaacgacccatgtgggaagcgcacctgatcgaaggaatccgcgggcgccaatttgccttgtattacaaaattcatcactccgtcatggacggtatctccgctatgcggattgcctctaagaccttgtccacggaccccagtgagcgggagatggcccccgcttgggcgtttaatactaagaagcgatcgcgcagcctgccaagcaatcccgtggatatggcgagctcgatggctcgactcactgcaagtatttcgaaacaagctgccaccgtgcccggcctggcacgagaggtctacaaggtgacccaaaaagctaaaaaggatgaaaattacgttagtattttccaagcaccagacaccatcctcaataatacgattacgggcagtcgacgcttcgccgctcagtcgttccctctcccccgtctgaaggttatcgctaaggcttacaactgcactattaacacggttgtgctctcgatgtgcggccacgccctgcgcgaatacctcatcagtcaacatgccctgccggatgaacccctgatcgcgatggtccctatgagcctgcgccaagatgatagcaccggaggcaaccagatcggaatgattttggcgaatctgggcacgcatatctgcgatcctgccaatcgcctgcgtgtcatccatgatagcgtggaggaggcgaaaagccgttttagccaaatgtctccggaggagattctgaactttacagcactcactatggcgccgaccggtctgaacttgctcaccggtttggctcccaaatggcgcgcatttaacgtcgttatctctaacatcccagggccaaaggaaccactgtactggaatggggcacagctccagggtgtgtatccggtctccatcgccttggatcggattgccctgaacattacactgacgtcttatgttgatcagatggagttcggcttgattgcgtgtcgccggaccctcccgtcgatgcaacgactcctcgactatctcgaacagagtatccgcgaactggagattggcgcgggcatcaaatag

SEQ ID NO: 66 - DNA, 1383 bp, Artificial Sequence
  Codon-optimized Acinetobacter baylii sp. DGATd
atggaattccggcccttgcaccccattgacttcatctttctgagtttggagaaacggcaacagcccatgcatgtcggtggcttgtttctcttccaaatccccgataacgccccggacacctttattcaggatctggtcaatgatatccggatctcgaaatcgatccccgtgccgccgtttaataataaactgaacggcctcttttgggacgaagacgaggaatttgatctggatcaccattttcggcacatcgctttgccccacccgggtcggattcgcgaactcctgatctatattagccaagaacacagcacgttgttggaccgggccaaaccgctctggacgtgcaatatcatcgaaggcatcgaaggcaaccgctttgcgatgtacttcaagattcatcacgcgatggttgacggtgtcgctggcatgcgcctgatcgaaaaatcgctgagccatgatgtgaccgaaaagagtatcgtccccccctggtgcgtggaaggtaagcgcgccaagcgcctccgcgaaccgaaaacgggcaagattaagaaaatcatgagcggtatcaagtcgcagctgcaggctaccccgaccgtgatccaggagctgtcgcaaaccgtgtttaaggatattggtcggaacccggatcatgtcagtagtttccaagctccctgttcgatcttgaatcagcgcgttagcagcagccgccggttcgctgctcaaagttttgatctcgatcggtttcggaatattgccaagtcgctgaacgtcaccatcaatgatgtggttctcgcggtttgttcgggtgccctccgcgcgtatctgatgagccataacagtctccccagtaagccgctgattgctatggttcccgcgtcgattcggaatgacgacagcgatgtgagcaaccggattaccatgatcctggctaacctcgcgacccacaaagatgatccgttgcaacgcctggagattatccgccgcagtgtgcagaacagtaaacagcgcttcaaacggatgaccagtgatcaaattctgaattacagcgctgtggtctatggtcccgccggcttgaatattatcagtggtatgatgcccaaacgccaagcgtttaacttggtgatcagtaatgtgccgggtccgcgcgaacccttgtattggaacggtgctaaactcgatgccctctaccccgccagtatcgtgctcgatggccaggctctcaatattaccatgaccagctatctcgataaactcgaggtgggtttgattgcgtgccgcaacgcgctgccccgcatgcagaacttgctgacccacctggaagaggaaatccagctcttcgagggcgtgattgcgaagcaggaagatattaaaacggccaactag

SEQ ID NO: 67 - DNA, 2535 bp, Synechococcus elongatus PCC 7942
atgagtgattccaccgcccaactcagctacgaccccaccacgagctacctcgagcccagtggcttggtctgtgaggatgaacggacttctgtgactcccgagaccttgaaacgggcttacgaggcccatctctactacagccagggcaaaacctcagcgatcgccaccctgcgtgatcactacatggcactggcctacatggtccgcgatcgcctcctgcaacggtggctagcttcactgtcgacctatcaacaacagcacgtcaaagtggtctgttacctgtccgctgagtttttgatgggtcggcacctcgaaaactgcctgatcaacctgcatcttcacgaccgcgttcagcaagttttggatgaactgggtctcgattttgagcaactgctagagaaagaggaagaacccgggctaggcaacggtggcctcggtcgcctcgcagcttgtttcctcgactccatggctaccctcgacattcctgccgtcggctatggcattcgctatgagttcggtatcttccaccaagaactccacaacggctggcagatcgaaatccccgataactggctgcgctttggcaacccttgggagctagagcggcgcgaacaggccgtggaaattaagttgggcggccacacggaggcctaccacgatgcgcgaggccgctactgcgtctcttggatccccgatcgcgtcattcgcgccatcccctacgacacccccgtaccgggctacgacaccaataacgtcagcatgttgcggctctggaaggctgagggcaccacggaactcaaccttgaggctttcaactcaggcaactacgacgatgcggttgccgacaaaatgtcgtcggaaacgatctcgaaggtgctctatcccaacgacaacaccccccaagggcgggaactgcggctggagcagcagtatttcttcgtctcggcttcgctccaagacatcatccgtcgccacttgatgaaccacggtcatcttgagcggctgcatgaggcgatcgcagtccagcttaacgacacccatcccagcgtggcggtgccggagttgatgcgcctcctgatcgatgagcatcacctgacttgggacaatgcttggacgattacacagcgcaccttcgcctacaccaaccacacgctgctacctgaagccttggaacgctggcccgtgggcatgttccagcgcactttaccgcgcttgatggagattatctacgaaatcaactggcgcttcttggccaatgtgcgggcctggtatcccggtgacgacacgagagctcgccgcctctccctgattgaggaaggagctgagccccaggtgcgcatggctcacctcgcctgcgtgggcagtcatgccatcaacggtgtggcagccctgcatacgcaactgctcaagcaagaaaccctgcgagatttctacgagctttggcccgagaaattcttcaacatgaccaacggtgtgacgccccgccgctggctgctgcaaagtaatcctcgcctagccaacctgatcagcgatcgcattggcaatgactggattcatgatctcaggcaactgcgacggctggaagacagcgtgaacgatcgcgagtttttacagcgctgggcagaggtcaagcaccaaaataaggtcgatctgagccgctacatctaccagcagactcgcatagaagtcgatccgcactctctctttgatgtgcaagtcaaacggattcacgaatacaaacgccagctcctcgctgtcatgcatatcgtgacgctctacaactggctgaagcacaatccccagctcaacctggtgccgcgcacttttatctttgcgggcaaagcggccccgggttactaccgtgccaagcaaatcgtcaaactgatcaatgcggtcgggagcatcatcaaccatgatcccgatgtccaagggcgactgaaggtcgtcttcctacctaacttcaacgtttccttggggcagcgcatttatccagctgccgatttgtcggagcaaatctcaactgcagggaaagaagcgtccggcaccggcaacatgaagttcaccatgaatggcgcgctgacaatcggaacctacgatggtgccaacatcgagatccgcgaggaagtcggccccgaaaacttcttcctgtttggcctgcgagccgaagatatcgcccgacgccaaagtcggggctatcgacctgtggagttctggagcagcaatgcggaactgcgggcagtcctcgatcgctttagcagtggtcacttcacaccggatcagcccaacctcttccaagacttggtcagcgatctgctgcagcgggatgagtacatgttgatggcggactatcagtcctacatcgactgccagcgcgaagctgctgctgcctaccgcgattccgatcgctggtggcggatgtcgctactcaacaccgcgagatcgggcaagttctcctccgatcgcacgatcgctgactacagcgaacagatctgggaggtcaaaccagtccccgtcagcctaagcactagcttttag

SEQ ID NO: 68 - protein, 844 aa, Synechococcus elongatus PCC 7942
MSDSTAQLSYDPTTSYLEPSGLVCEDERTSVTPETLKRAYEAHLYYSQGKTSAIATLRDHYMALAYMVRDRLLQRWLASLSTYQQQHVKVVCYLSAEFLMGRHLENCLINLHLHDRVQQVLDELGLDFEQLLEKEEEPGLGNGGLGRLAACFLDSMATLDIPAVGYGIRYEFGIFHQELHNGWQIEIPDNWLRFGNPWELERREQAVEIKLGGHTEAYHDARGRYCVSWIPDRVIRAIPYDTPVPGYDTNNVSMLRLWKAEGTTELNLEAFNSGNYDDAVADKMSSETISKVLYPNDNTPQGRELRLEQQYFFVSASLQDIIRRHLMNHGHLERLHEAIAVQLNDTHPSVAVPELMRLLIDEHHLTWDNAWTITQRTFAYTNHTLLPEALERWPVGMFQRTLPRLMEIIYEINWRFLANVRAWYPGDDTRARRLSLIEEGAEPQVRMAHLACVGSHAINGVAALHTQLLKQETLRDFYELWPEKFFNMTNGVTPRRWLLQSNPRLANLISDRIGNDWIHDLRQLRRLEDSVNDREFLQRWAEVKHQNKVDLSRYIYQQTRIEVDPHSLFDVQVKRIHEYKRQLLAVMHIVTLYNWLKHNPQLNLVPRTFIFAGKAAPGYYRAKQIVKLINAVGSIINHDPDVQGRLKVVFLPNFNVSLGQRIYPAADLSEQISTAGKEASGTGNMKFTMNGALTIGTYDGANIEIREEVGPENFFLFGLRAEDIARRQSRGYRPVEFWSSNAELRAVLDRFSSGHFTPDQPNLFQDLVSDLLQRDEYMLMADYQSYIDCQREAAAAYRDSDRWWRMSLLNTARSGKFSSDRTIADYSEQIWEVKPVPVSLSTSF

SEQ ID NO: 69 - DNA, 2085 bp, Synechococcus elongatus PCC 7942
atgactgtttcatcccgtcgccctgaatcgaccgtggctgttgaccccggccaaagctatcccctcggggcaaccgtctatcccaccggcgtcaacttctcgctctacaccaagtacgcgacgggcgttgaattactgctgtttgatgaccctgagggtgcccagcctcaacggacagtgcgcctcgatccgcacctcaatcgcacctctttctactggcatgtttttattccgggcattcgctccggtcaggtttatgcttaccgcgtctttggcccctacgcacctgatcgcggcctctgttttaaccccaacaaagtgctgctggatccctacgctcgcggggttgtcggctggcagcactacagtcgcgaagcggctattaaacccagtaataactgcgttcaagccctgcgtagcgtggttgttgaccccagcgactacgactgggaaggcgatcgccatccacgcacaccctacgctcgcacagtaatctatgagctgcatgttggcggcttcaccaagcatcccaattccggcgtcgcccctgaaaaacgtggcacctacgctggtctaatcgaaaaaattccctacctgcaatccctcggcgtcacggccgttgagttgctgccggtgcaccagttcgatcgccaagatgcccccttaggacgcgagaactactggggctacagcaccatggctttttttgcgccccacgcagcctacagctctcgccatgatccacttggtccagttgatgagttccgcgacctcgtcaaggcgctccaccaagcagggattgaggtgattctcgacgtggtgttcaaccacactgctgaagggaatgaagacggtccaacgctgtctttcaaaggtctagcgaattcaacctactatctgctggatgaacaggcgggctatcgcaactacaccggctgcggcaacaccgtcaaagctaacaattcgatcgtgcgatcgctgattctcgattgcctgcgttattgggtctcggaaatgcacgtcgatggcttccgctttgaccttgcgtcggtgctgagtcgtgatgccaatggcaaccccctatcggatccgcccttgctttgggcgattgattccgatccggttttggccggtacgaagctcattgctgaagcttgggacgcagccggcttatatcaggttggtacctttattggcgatcgctttgggacttggaacggtcccttccgggacgatattcggcgtttttggcgtggagatcagggctgtacttacgccctcagtcaacgcctgctgggtagccccgatgtctacagcacagaccaatggtatgccggacgcaccattaacttcatcacctgccatgacggctttacgctgcgagatctagtcagctatagccagaagcacaactttgccaatggagagaacaatcgggacgggaccaatgacaactacagctggaactacggcattgaaggcgagaccgatgaccccacgattctgagcttacgggaacggcagcagcgcaatttgctcgccacgttattcctcgcccagggcacaccgatgctgacgatgggcgatgaggtcaaacgcagtcagcagggtaacaataacgcctactgccaagacaatgagatcagctggtttgattggtcgctgtgcgatcgccatgccgatttcttggtgttcagtcgccgcctgattgaactttcccagtcgctggtgatgttccaacagaacgaactgctgcagaacgaaccccatccgcgtcgtccctatgccatctggcatggcgtcaaactcaaacaacccgattgggcgctgtggtcccacagtctggccgtcagtctctgccatcctcgccagcaggaatggctttacctagcctttaatgcttactgggaagacctgcgcttccagttgccgaggcctcctcgcggccgcgtttggtatcgcttgctcgatacttcactgccgaatcttgaagcttgtcatctgccggatgaggcaaaaccctgcctacggcgcgattacatcgtcccagcgcgatcgctcttactgttgatggctcgtgcttaa

SEQ ID NO: 70 - protein, 694 aa, Synechococcus elongatus PCC 7942
MTVSSRRPESTVAVDPGQSYPLGATVYPTGVNFSLYTKYATGVELLLFDDPEGAQPQRTVRLDPHLNRTSFYWHVFIPGIRSGQVYAYRVFGPYAPDRGLCFNPNKVLLDPYARGVVGWQHYSREAAIKPSNNCVQALRSVVVDPSDYDWEGDRHPRTPYARTVIYELHVGGFTKHPNSGVAPEKRGTYAGLIEKIPYLQSLGVTAVELLPVHQFDRQDAPLGRENYWGYSTMAFFAPHAAYSSRHDPLGPVDEFRDLVKALHQAGIEVILDVVFNHTAEGNEDGPTLSFKGLANSTYYLLDEQAGYRNYTGCGNTVKANNSIVRSLILDCLRYWVSEMHVDGFRFDLASVLSRDANGNPLSDPPLLWAIDSDPVLAGTKLIAEAWDAAGLYQVGTFIGDRFGTWNGPFRDDIRRFWRGDQGCTYALSQRLLGSPDVYSTDQWYAGRTINFITCHDGFTLRDLVSYSQKHNFANGENNRDGTNDNYSWNYGIEGETDDPTILSLRERQQRNLLATLFLAQGTPMLTMGDEVKRSQQGNNNAYCQDNEISWFDWSLCDRHADFLVFSRRLIELSQSLVMFQQNELLQNEPHPRRPYAIWHGVKLKQPDWALWSHSLAVSLCHPRQQEWLYLAFNAYWEDLRFQLPRPPRGRVWYRLLDTSLPNLEACHLPDEAKPCLRRDYIVPARSLLLLMARA

SEQ ID NO: 71 - DNA, 1500 bp, Synechococcus elongatus PCC 7942
gtgtttacacgagccgccggcattttgttacatcccacttcgttgccggggccattcggcagcggcgaccttggtccggcctcgcggcagtttcttgactggttggcaacggcgggacaacaactgtggcaagtgttgccccttgggccgacaggctatggctattcgccttacctctgctattccgccttggctggcaatcccgctctgatcagccctgaactcttggcagaagatggctggctccaagaatcggactgggcagactgtcctgcttttccgagcgatcgcgtcgattttgccagcgtcttgccctatcgcgatcaactgctgcgccgtgcctacagccaattcctgcaaagagcggcttccagcgatcgccaactctttcaagctttctgtgaacaggaagcccattggctggatgactacgccctgttcatggcgattaagctggctagccaaggtcagccttggacagaatggccggaagcgctgcgtcagcggcaacctcaagccttggctaaagcccgcgatcgctggggcggcgaaattggcttccagcagtttctgcagtggcaatttcgcgagcagtggttggccctgcgggaagaagcccaagcccgccatatttcgctgattggcgatattccgatctacgtcgctcatgacagtgcggacgtttgggccaatcctcagttctttgccctcgatcctgaaacgggcgcagttgatcagcaggccggtgtgccgcctgactatttctccgaaaccggccaactctggggcaatcccgtctacaactgggctgcgctgcaggcggatggctatcgctggtggttgcaacggctgcaacagctcctcagcttagtggactacattcgcatcgaccacttccgcggtttagaggcgttttggtcggttcccgctggtgaagaaacggcgatcgacggagagtgggtcaaagccccaggcgctgatctgctgagcacgattcgccaaaaactgggagcgctaccgattctggcagaggatctcggtgtgattacgccggaggtggaagcgctgcgcgatcgctttgagctgccgggcatgaagattctgcagttcgcctttgactctggggccggcaatgcctatctaccgcacaactactggggtcgtcgctgggtggcttacaccggcacccacgacaatgacacgaccgtcggctggttcctgtcccgcaatgacagcgatcgccaaacggtgctggattatctgggcgcagagtcgggctgggaaattgagtggaagctgatccgcttggcttggagctcgacggcagattgggcgatcgcaccgctccaagatgtcttcgggctggatagcagcgcccgcatgaatcgaccggggcaagccaccggcaactgggactggcgcttcagtgccgactggctgacgggcgatcgtgcccaacgcctgcggcgactctcgcagctctatggacgctgtagatga

SEQ ID NO: 72 - protein, 499 aa, Synechococcus elongatus PCC 7942
MFTRAAGILLHPTSLPGPFGSGDLGPASRQFLDWLATAGQQLWQVLPLGPTGYGYSPYLCYSALAGNPALISPELLAEDGWLQESDWADCPAFPSDRVDFASVLPYRDQLLRRAYSQFLQRAASSDRQLFQAFCEQEAHWLDDYALFMAIKLASQGQPWTEWPEALRQRQPQALAKARDRWGGEIGFQQFLQWQFREQWLALREEAQARHISLIGDIPIYVAHDSADVWANPQFFALDPETGAVDQQAGVPPDYFSETGQLWGNPVYNWAALQADGYRWWLQRLQQLLSLVDYIRIDHFRGLEAFWSVPAGEETAIDGEWVKAPGADLLSTIRQKLGALPILAEDLGVITPEVEALRDRFELPGMKILQFAFDSGAGNAYLPHNYWGRRWVAYTGTHDNDTTVGWFLSRNDSDRQTVLDYLGAESGWEIEWKLIRLAWSSTADWAIAPLQDVFGLDSSARMNRPGQATGNWDWRFSADWLTGDRAQRLRRLSQLYGRCR

SEQ ID NO: 73 - protein, 543 aa, Synechococcus elongatus PCC 7942
MNIHTVATQAFSDQKPGTSGLRKQVPVFQKRHYLENFVQSIFDSLEGYQGQTLVLGGDGRYYNRTAIQTILKMAAANGWGRVLVGQGGILSTPAVSNLIRQNGAFGGIILSASHNPGGPEGDFGIKYNISNGGPAPEKVTDAIYACSLKIEAYRILEAGDVDLDRLGSQQLGEMTVEVIDSVADYSRLMQSLFDFDRIRDRLRGGLRIAIDSMHAVTGPYATTIFEKELGAAAGTVFNGKPLEDFGGGHPDPNLVYAHDLVELLFGDRAPDFGAASDGDGDRNMILGNHFFVTPSDSLAILAANASLVPAYRNGLSGIARSMPTSAAADRVAQALNLPCYETPTGWKFFGNLLDADRVTLCGEESFGTGSNHVREKDGLWAVLFWLNILAVREQSVAEIVQEHWRTYGRNYYSRHDYEGVESDRASTLVDKLRSQLPSLTGQKLGAYTVAYADDFRYEDPVDGSISEQQGIRIGFEDGSRMVFRLSGTGTAGATLRLYLERFEGDTTKQGLDPQVALADLIAIADEVAQITTLTGFDQPTVIT

SEQ ID NO: 74 - protein, 567 aa, Synechocystis sp. PCC 6803
MSKPLIAALHFLQFLYMTSRINPLAGQHPPADSLLDVAKLLDDYYRQQPDPENPAQLVSFGTSGHRGSALNGTFNEAHILAVTQAVVDYRQAQGITGPLYMGMDSHALSEPAQKTALEVLAANQVETFLTTATDLTRFTPTPAVSYAILTHNQGRKEGLADGIIITPSHNPPTDGGFKYNPPSGGPAEPEATQWIQNRANELLKNGNKTVKRLDYEQALKATTTHAHDFVTPYVAGLADIIDLDVIRSAGLRLGVDPLGGANVGYWEPIAAKYNLNISLVNPGVDPTFKFMTLDWDGKIRMDCSSPYAMASLVKIKDHYDIAFGNDTDGDRHGIVTPSVGLMNPNHFLSVAIWYLFSQRQQWSGLSAIGKTLVSSSMIDRVGAMINRQVYEVPVGFKWFVSGLLDGSFGFGGEESAGASFLKKNGTVWTTDKDGTIMDLLAAEITAKTGKDPGLHYQDLTAKLGNPIYQRIDAPATPAQKDRLKKLSPDDVTATSLAGDAITAKLTKAPGNQAAIGGLKVTTAEGWFAARPSGTENVYKIYAESFKDEAHLQAIFTEAEAIVTSALG

SEQ ID NO: 75 - DNA, 1632 bp, Synechococcus elongatus PCC 7942; identical to SEQ ID NO: 24

SEQ ID NO: 76 - protein, 543 aa, Synechococcus elongatus PCC 7942; identical to SEQ ID NO: 73

SEQ ID NO: 77 - protein, 552 aa, Synechococcus sp. WH8102
MTTSAPAEPTLRLVRLDAPFTDQKPGTSGLRKSSQQFEQANYLESFVEAVFRTLPGVQGGTLVLGGDGRYGNRRAIDVILRMGAAHGLSKVIVTTGGILSTPAASNLIRQRQAIGGIILSASHNPGGPNGDFGVKVNGANGGPTPASFTDAVFECTKTLEQYTIVDAAAIAIDTPGSYSIGAMQVEVIDGVDDFVALMQQLFDFDRIRELIRSDFPLAFDAMHAVTGPYATRLLEEILGAPAGSVRNGVPLEDFGGGHPDPNLTYAHELAELLLDGEEFRFGAACDGDGDRNMILGQHCFVNPSDSLAVLTANATVAPAYADGLAGVARSMPTSSAVDVVAKELGIDCYETPTGWKFFGNLLDAGKITLCGEESFGTGSNHVREKDGLWAVLFWLQILAERRCSVAEIMAEHWKRFGRHYYSRHDYEAVASDAAHGLFHRLEGMLPGLVGQSFAGRSVSAADNFSYTDPVDGSVTKGQGLRILLEDGSRVMVRLSGTGTKGATIRVYLESYVPSSGDLNQDPQVALADMISAINELAEIKQRTGMDRPTVIT

SEQ ID NO: 78 - DNA, 1662 bp, Synechococcus sp. RCC 307
gtgacgctttcctcacccagcactgagttctccgtgcagcagatcaagctgccagaagcgtttcaagaccagaagcctggcacctcgggactgcgcaagagcacccaacaatttgaacagcctcattacctcgaaagttttatcgaggcgatcttccgcaccctccctggtgtgcaaggcgggaccttggtggtgggcggtgatggccgctacggcaaccgccgcgccatcgatgtcatcacccggatggcggcagcccatggactggggcggattgtgctgaccaccggcggcatcctctccacccctgccgcttccaacttgatccgccaacgccaggccattggcggcatcatcctctcggccagccacaaccctggagggcccaaaggcgactttggcgtcaaggtcaatggcgccaacggcggccctgcccctgaatctcttaccgatgccatctacgcctgcagccagcagctcgatggctaccgcatcgcaagtggaaccgcactgcccctcgacgccccagccgagcatcaaatcggtgcgttgaacgtggaggtgatcgacggcgtcgacgactacctgcaactgatgcagcacttgttcgacttcgatctgatcagcgatttgctcaagggctcatggccaatggcctttgacgccatgcatgccgtcactggtccctacgccagcaaactctttgagcagctcctaggagccccaagcgggaccgtgcgcaacgggcgctgcctcgaagactttggtggcggccatcccgatcccaacctcacctacgccaaagagctggcgacgctgctgctggatggtgatgactatcgctttggcgcggcctgtgatggcgatggcgaccgcaacatgattttggggcagcgctgctttgtgaaccccagcgacagcctcgctgtcttaacggcgaacgccaccttggtgaagggctatgcctccggcctggccggcgttgctcgctcgatgcccaccagtgccgcagtggatgtggtggccaagcagctggggatcaattgctttgagacccccaccggttggaaatttttcggcaacctgctcgatgccggacgcatcaccctttgcggggaagagagctttggaacaggcagtgatcacatccgcgaaaaagatggcctctgggctgtgttgttttggctctcgatcctggccaagcgccaatgctctgttgcggaggtgatgcagcagcactggagcacctacgggcgtcattactactcgcgccatgactacgaaggtgtcgaaaccgatcgggcccatgggctctacaacggcctgcgcgatcggcttggcgagctgactggaaccagctttgccgatagccgcatcgccaatgctgacgacttcgcctacagcgaccccgtcgatggctcactgacccagaagcaaggcctacgtctgctcctggaggacggcagccgcatcatcctgcggctctcgggaaccggcaccaaaggagccacgctgcggctctatctcgagcgctatgtcgccactggcggcaacctcgatcaaaatccccagcaagccttagccggcatgattgcggccgccgatgccctcgccggcatccggtcaaccaccggcatggatgtccccacggtgatcacctga

SEQ ID NO: 79 - protein, 553 aa, Synechococcus sp. RCC 307
MTLSSPSTEFSVQQIKLPEAFQDQKPGTSGLRKSTQQFEQPHYLESFIEAIFRTLPGVQGGTLVVGGDGRYGNRRAIDVITRMAAAHGLGRIVLTTGGILSTPAASNLIRQRQAIGGIILSASHNPGGPKGDFGVKVNGANGGPAPESLTDAIYACSQQLDGYRIASGTALPLDAPAEHQIGALNVEVIDGVDDYLQLMQHLFDFDLISDLLKGSWPMAFDAMHAVTGPYASKLFEQLLGAPSGTVRNGRCLEDFGGGHPDPNLTYAKELATLLLDGDDYRFGAACDGDGDRNMILGQRCFVNPSDSLAVLTANATLVKGYASGLAGVARSMPTSAAVDVVAKQLGINCFETPTGWKFFGNLLDAGRITLCGEESFGTGSDHIREKDGLWAVLFWLSILAKRQCSVAEVMQQHWSTYGRHYYSRHDYEGVETDRAHGLYNGLRDRLGELTGTSFADSRIANADDFAYSDPVDGSLTQKQGLRLLLEDGSRIILRLSGTGTKGATLRLYLERYVATGGNLDQNPQQALAGMIAAADALAGIRSTTGMDVPTVIT

SEQ ID NO: 80 - DNA, 1467 bp, Synechococcus sp PCC 7002
gtgttggcgtttgggaatcaacagccgattcggttcggcacagacggttggcgtggcattattgcggcggattttacctttgaacgggtgcaacgggtggcgatcgccacagcccatgttttaaaagaaaatttcgcaaaccaagccattgataacacgataatcgtcggctacgaccggcggtttctcgcagatgaatttgcccttgctgccgccgaagcgatccagggggaaggatttcacgtacttctagccaatagttttgcgccaaccccagccctgagctatgccgcccaccaccacaaggctctgggggcgatcgccttaacggccagccataatccagcgggttatttaggattaaaagtgaaaggggctttcggcggctcggtttccgaagaaattacggctcagattgaagcgcgactggaagccgggattgatcctcaacattcaacgacgggccgtttagattattttgatccctggcaggactattgcgccggattacagcaactggttgatttagaaaaaattcgccaggcgatcgccgctggtcgtctccaggtctttgccgatgtaatgtatggcgcagcggcgggcggtttgacccaactgctcaatgcggcgatccaagaaatccattgtgaaccagatcctttgttcggcggccgcccaccagagcctttagaaaaacatttgtctcaactgcaacgcaccattcgcgccgcccataatcaagatttagaggcaattcaggtgggatttgtctttgatggtgatggcgatcgcattgctgctgtggctggggatggtgagtttctcagttcccaaaagctaatcccgattttgctggcccatttgtcccaaaatcgccaatatcaaggggaagtggtaaaaactgtcagcggctctgatttaatcccccgtttgagcgaatactacggtttgccagtctttgaaacacccatcggctacaaatacattgccgaacgaatgcaacagacccaggtgcttcttggtggcgaagaatccggcggcattggctacggccaccacattcccgaacgggatgcgctgctggcggcattgtatctcctagaggcgatcgccatttttgatcaagacctcggcgagatttaccagagtcttcaaagcaaagctaatttttatggcgcctacgaccgcattgatttacatttgcgggatttctccagccgcgatcgcctattaaaaatcctcgcgacaaatccccccaaggcgatctccaaccatgacgtaattcacagcgaccccaaagatggctataaattccgccttgctgatcaaagttggttgctgattcgcttcagtggtaccgagcctgtactgcggttatatagtgaagcggtcaatcctaaagccgtacaagaaatcctcgcctgggcgcaaacctgggctgaggctgccgaccaagccgaaggttag

SEQ ID NO: 81 - protein, 488 aa, Synechococcus sp PCC 7002
MLAFGNQQPIRFGTDGWRGIIAADFTFERVQRVAIATAHVLKENFANQAIDNTIIVGYDRRFLADEFALAAAEAIQGEGFHVLLANSFAPTPALSYAAHHHKALGAIALTASHNPAGYLGLKVKGAFGGSVSEEITAQIEARLEAGIDPQHSTTGRLDYFDPWQDYCAGLQQLVDLEKIRQAIAAGRLQVFADVMYGAAAGGLTQLLNAAIQEIHCEPDPLFGGRPPEPLEKHLSQLQRTIRAAHNQDLEAIQVGFVFDGDGDRIAAVAGDGEFLSSQKLIPILLAHLSQNRQYQGEVVKTVSGSDLIPRLSEYYGLPVFETPIGYKYIAERMQQTQVLLGGEESGGIGYGHHIPERDALLAALYLLEAIAIFDQDLGEIYQSLQSKANFYGAYDRIDLHLRDFSSRDRLLKILATNPPKAISNHDVIHSDPKDGYKFRLADQSWLLIRFSGTEPVLRLYSEAVNPKAVQEILAWAQTWAEAADQAEG

SEQ ID NO: 82 - DNA, 1038 bp, Synechococcus elongatus PCC 7942
atgaccttgctattggccggggatatcggcggaaccaaaacgaatttaatgttggcgatcgcctctgattgcgatcgtttagaaccgctccatcaggccagttttgccagtgcggcctaccctgatttagtgccgatggtgcaggagtttttggctgccgcaccctccgccgaggtgcgatcgccagttgtggcttgttttggcattgccggccccgttgtccatggaaccgcgaagctgacgaacctgccttggcagctctctgaagcgcggctggcgaaggaattgggcattgcgcaggtggcgttgatcaatgattttgctgcgatcgcctacggcctacccggcttgaccgccgaagatcaagtcgttgtgcaagtcggtgaagccgatccggcggctccgatcgccattctgggggcaggaactggcttgggcgaaggcttcatcattcccacagcccaaggccgccaagtgtttggcagcgaaggttctcacgctgactttgcgccgcaaaccgaactggagtccgagttactgcattttctacgcaatttttacgcaatcgagcatatctcggtcgagcgagtggtctccggccaagggattgcagccatctacgccttcctgcgcgatcgccatcccgaccaagaaaatccagcccttggggcgattgcctcggcttggcaaacgggcggcgaccaagcccctgatctggcagcagccgtatcccaagcagccttgagcgatcgcgatccgctggccctacaagccatgcagatatttgtcagtgcttacggggcggaagccggcaacctcgcgttgaaattgctctcctacggcggggtctacgtcgccggcgggattgcgggcaaaatcctgccgctcttgactgatggcacttttctgcaagccttccaagccaagggacgggtgaaggggctgctgacgcggatgcctatcacgatcgtcacgaaccacgaagtcgggctgatcggggctggactgcgggcggctgcgatcgctactcaaccatga

SEQ ID NO: 83 - protein, 345 aa, Synechococcus elongatus PCC 7942
MTLLLAGDIGGTKTNLMLAIASDCDRLEPLHQASFASAAYPDLVPMVQEFLAAAPSAEVRSPVVACFGIAGPVVHGTAKLTNLPWQLSEARLAKELGIAQVALINDFAAIAYGLPGLTAEDQVVVQVGEADPAAPIAILGAGTGLGEGFIIPTAQGRQVFGSEGSHADFAPQTELESELLHFLRNFYAIEHISVERVVSGQGIAAIYAFLRDRHPDQENPALGAIASAWQTGGDQAPDLAAAVSQAALSDRDPLALQAMQIFVSAYGAEAGNLALKLLSYGGVYVAGGIAGKILPLLTDGTFLQAFQAKGRVKGLLTRMPITIVTNHEVGLIGAGLRAAAIATQP

SEQ ID NO: 84 - DNA, 1587 bp, Synechococcus elongatus PCC 7942
atgaccgcccagcagctctggcaacgctacctcgattggctctactacgatccctcgctggagttttacctcgacatcagccgcatgggattcgatgacgctttcgttactagcatgcagcccaagttccagcacgcctttgcggcgatggcagagctcgaggccggagcgatcgccaaccccgatgaacagcggatggtcggccactactggctgcgcgatcctgagctggcacccacaccggagctgcagacccaaattcgcgacacgctggccgcgatccaagacttcgccctcaaagtacacagtggcgtgttgcggccacccaccggctcccgcttcaccgacattctctcaattggcattggcgggtcggccctagggccgcagtttgtctcagaagccctccggcctcaagcggcactgctccagattcacttctttgacaacaccgatccagctggcttcgatcgcgttttagctgatctcggcgatcgccttgcttccaccttagtaatcgttatttccaaatctggcggcactcccgaaacccgcaacggcatgctggaggttcagtccgcctttgcccagcgagggattgcctttgcgccccaagctgtcgccgtcacaggggtggggagccatctcgatcatgtagcgatcacagaaagatggctggcccgtttccccatggaagactgggtgggcggccgcacctctgaactatctgcagtcggtctactctcggcagccctactgggcatcgacatcaccgccatgctggccggggcgcggcaaatggacgccctgacccgccattccgatttgcgacaaaatccggcagcgctcttggctttgagctggtactgggccggcaatgggcaaggcaaaaaagacatggtcatcctgccctacaaggacagcctgctgctgtttagccgctatctgcagcagttgatcatggagtcactgggcaaggagcgcgatctgctcggcaaggtagttcaccaaggcatcgccgtttacggcaacaaaggctcgaccgatcaacatgcctacgtccagcaactgcgcgagggcattcctaacttctttgccacgtttatcgaggtgctcgaagaccgacaggggccgtcgccagtcgtggagcctggcatcaccagtggcgactatctcagcgggctgcttcaaggcacccgcgcggcgctttacgaaaatgggcgtgagtcgatcacgattacggtgccgcgcgttgatgcacaacaggtgggggccttgatcgcgctgtatgaacgggcggtgggactctatgccagcttggttggcatcaatgcctatcaccagccgggggtggaagccggcaaaaaggctgctgccggtgttctcgagatccagcgccagattgtggagttgctccaacagggacaaccactctcgatcgcagcgatcgcagacgatttaggtcagagtgagcagattgaaacgatctacaaaatcctgcgccatctcgaagccaatcaacgcggcgttcagttaaccggcgatcgccataatcccctcagtctgattgcgagttggcaacgataa

SEQ ID NO: 85 - protein, 528 aa, Synechococcus elongatus PCC 7942
MTAQQLWQRYLDWLYYDPSLEFYLDISRMGFDDAFVTSMQPKFQHAFAAMAELEAGAIANPDEQRMVGHYWLRDPELAPTPELQTQIRDTLAAIQDFALKVHSGVLRPPTGSRFTDILSIGIGGSALGPQFVSEALRPQAALLQIHFFDNTDPAGFDRVLADLGDRLASTLVIVISKSGGTPETRNGMLEVQSAFAQRGIAFAPQAVAVTGVGSHLDHVAITERWLARFPMEDWVGGRTSELSAVGLLSAALLGIDITAMLAGARQMDALTRHSDLRQNPAALLALSWYWAGNGQGKKDMVILPYKDSLLLFSRYLQQLIMESLGKERDLLGKVVHQGIAVYGNKGSTDQHAYVQQLREGIPNFFATFIEVLEDRQGPSPVVEPGITSGDYLSGLLQGTRAALYENGRESITITVPRVDAQQVGALIALYERAVGLYASLVGINAYHQPGVEAGKKAAAGVLEIQRQIVELLQQGQPLSIAAIADDLGQSEQIETIYKILRHLEANQRGVQLTGDRHNPLSLIASWQR

SEQ ID NO: 86 - protein, 439 aa, Synechocystis sp. PCC 6803
MCCWQSRGLLVKRVLAIILGGGAGTRLYPLTKLRAKPAVPLAGKYRLIDIPVSNCINSEIVKIYVLTQFNSASLNRHISRAYNFSGFQEGFVEVLAAQQTKDNPDWFQGTADAVRQYLWLFREWDVDEYLILSGDHLYRMDYAQFVKRHRETNADITLSVVPVDDRKAPELGLMKIDAQGRITDFSEKPQGEALRAMQVDTSVLGLSAEKAKLNPYIASMGIYVFKKEVLHNLLEKYEGATDFGKEIIPDSASDHNLQAYLFDDYWEDIGTIEAFYEANLALTKQPSPDFSFYNEKAPIYTRGRYLPPTKMLNSTVTESMIGEGCMIKQCRIHHSVLGIRSRIESDCTIEDTLVMGNDFYESSSERDTLKARGEIAAGIGSGTTIRRAIIDKNARIGKNVMIVNKENVQEANREELGFYIRNGIVVVIKNVTIADGTVI

SEQ ID NO: 87 - protein, 429 aa, Nostoc sp. PCC 7120
MKKVLAIILGGGAGTRLYPLTKLRAKPAVPVAGKYRLIDIPVSNCINSEIFKIYVLTQFNSASLNRHIARTYNFSGFSEGFVEVLAAQQTPENPNWFQGTADAVRQYLWMLQEWDVDEFLILSGDHLYRMDYRLFIQRHRETNADITLSVIPIDDRRASDFGLMKIDNSGRVIDFSEKPKGEALTKMRVDTTVLGLTPEQAASQPYIASMGIYVFKKDVLIKLLKEALERTDFGKEIIPDAAKDHNVQAYLFDDYWEDIGTIEAFYNANLALTQQPMPPFSFYDEEAPIYTRARYLPPTKLLDCHVTESIIGEGCILKNCRIQHSVLGVRSRIETGCMIEESLLMGADFYQASVERQCSIDKGDIPVGIGPDTIIRRAIIDKNARIGHDVKIINKDNVQEADRESQGFYIRSGIVVVLKNAVITDGTII

SEQ ID NO: 88 - protein, 429 aa, Anabaena variabilis
MKKVLAIILGGGAGTRLYPLTKLRAKPAVPVAGKYRLIDIPVSNCINSEIFKIYVLTQFNSASLNRHIARTYNFSGFSEGFVEVLAAQQTPENPNWFQGTADAVRQYLWMLQEWDVDEFLILSGDHLYRMDYRLFIQRHRETNADITLSVIPIDDRRASDFGLMKIDNSGRVIDFSEKPKGEALTKMRVDTTVLGLTPEQAASQPYIASMGIYVFKKDVLIKLLKESLERTDFGKEIIPDASKDHNVQAYLFDDYWEDIGTIEAFYNANLALTQQPMPPFSFYDEEAPIYTRARYLPPTKLLDCHVTESIIGEGCILKNCRIQHSVLGVRSRIETGCVIEESLLMGADFYQASVERQCSIDKGDIPVGIGPDTIIRRAIIDKNARIGHDVKIINKDNVQEADRESQGFYIRSGIVVVLKNAVITDGTII

SEQ ID NO: 89 - protein, 428 aa, Trichodesmium erythraeum IMS 101
MKNVLSIILGGGAGTRLYPLTKLRAKPAVPLAGKYRLIDIPISNCINSEIQKIYVLTQFNSASLNRHITRTYNFSGFSDGFVEVLAAQQTKDNPEWFQGTADAVRKYIWLFKEWDIDYYLILSGDHLYRMDYRDFVQRHIDTKADITLSVLPIDEARASEFGVMKIDNSGRIVEFSEKPKGNALKAMAVDTSILGVSPEIATKQPYIASMGIYVFNKDAMIKLIEDSEDTDFGKEILPKSAQSYNLQAYPFQGYWEDIGTIKSFYEANLALTQQPQPPFSFYDEQAPIYTRSRYLPPSKLLDCEITESIVGEGCILKKCRIDHCVLGVRSRIEANCIIQDSLLMGSDFYESPTERRYGLKKGSVPLGIGAETKIRGAIIDKNARIGCNVQIINKDNVEEAQREEEGFIIRSGIVVVLKNATIPDGTVI

SEQ ID NO: 90 - protein, 430 aa, Synechococcus elongatus PCC 7942
MKNVLAIILGGGAGSRLYPLTKQRAKPAVPLAGKYRLIDIPVSNCINADINKIYVLTQFNSASLNRHLSQTYNLSSGFGNGFVEVLAAQITPENPNWFQGTADAVRQYLWLIKEWDVDEYLILSGDHLYRMDYSQFIQRHRDTNADITLSVLPIDEKRASDFGLMKLDGSGRVVEFSEKPKGDELRAMQVDTTILGLDPVAAAAQPFIASMGIYVFKRDVLIDLLSHHPEQTDFGKEVIPAAATRYNTQAFLFNDYWEDIGTIASFYEANLALTQQPSPPFSFYDEQAPIYTRARYLPPTKLLDCQVTQSIIGEGCILKQCTVQNSVLGIRSRIEADCVIQDALLMGADFYETSELRHQNRANGKVPMGIGSGSTIRRAIVDKNAHIGQNVQIVNKDHVEEADREDLGFMIRSGIVVVVKGAVIPDNTVI

SEQ ID NO: 91 - protein, 431 aa, Synechococcus sp. WH8102
MKRVLAIILGGGAGTRLYPLTKMRAKPAVPLAGKYRLIDIPISNCINSNINKMYVMTQFNSASLNRHLSQTFNLSASFGQGFVEVLAAQQTPDSPSWFEGTADAVRKYQWLFQEWDVDEYLILSGDQLYRMDYSLFVEHHRSTGADLTVAALPVDPKQAEAFGLMRTDGDGDIKEFREKPKGDSLLEMAVDTSRFGLSANSAKERPYLASMGIYVFSRDTLFDLLDSNPGYKDFGKEVIPEALKRGDKLKSYVFDDYWEDIGTIGAFYEANLALTQQPTPPFSFYDEKFPIYTRPRYLPPSKLVDAQITNSIVGEGSILKSCSIHHCVLGVRSRIETDVVLQDTLVMGADFFESSDERAVLRERGGIPVGVGQGTTVKRAILDKNARIGSNVTIVNKDHVEEADRSDQGFYIRNGIVVVVKNATIQDGTVI

SEQ ID NO: 92 - protein, 431 aa, Synechococcus sp. RCC 307
MKRVLAIILGGGAGTRLYPLTKMRAKPAVPLAGKYRLIDIPVSNCINSGINKIYVLTQFNSASLNRHIAQTFNLSSGFDQGFVEVLAAQQTPDSPSWFEGTADAVRKYEWLLQEWDIDEVLILSGDQLYRMDYAHFVAQHRASGADLTVAALPVDREQAQSFGLMHTGAEASITKFREKPKGEALDEMSCDTASMGLSAEEAHRRPFLASMGIYVFKRDVLFRLLAENPGATDFGKEIIPKALDDGFKLRSYLFDDYWEDIGTIRAFYEANLALTTQPRPPFSFYDKRFPIYTRHRYLPPSKLQDAQVTDSIVGEGSILKACSIHHCVLGVRSRIEDEVALQDTLVMGNDFYESGEERAILRERGGIPMGVGRGTTVKKAILDKNVRIGSNVSIINKDNVEEADRAEQGFYIRGGIVVITKNASIPDGMVI

SEQ ID NO: 93 - protein, 429 aa, Synechococcus sp. PCC 7002
MKRVLGIILGGGAGTRLYPLTKLRAKPAVPLAGKYRLIDIPVSNCINSEIHKIYILTQFNSASLNRHISRTYNFTGFTEGFTEVLAAQQTKENPDWFQGTADAVRQYSWLLEDWDVDEYIILSGDHLYRMDYREFIQRHRDTGADITLSVVPVGEKVAPAFGLMKIDANGRVVDFSEKPTGEALKAMQVDTQSLGLDPEQAKEKPYIASMGIYVFKKQVLLDLLKEGKDKTDFGKEIIPDAAKDYNVQAYLFDDYWADIGTIEAFYEANLGLTKQPIPPFSFYDEKAPIYTRARYLPPTKVLNADVTESMISEGCIIKNCRIHHSVLGIRTRVEADCTIEDTMIMGADYYQPYEKRQDCLRRGKPPIGIGEGTTIRRAIIDKNARIGKNVMIVNKENVEESNREELGYYIRSGITVVLKNAVIPDGTVI

SEQ ID NO: 94 - protein, 477 aa, Synechocystis sp. PCC 6803
MKILFVAAEVSPLAKVGGMGDVVGSLPKVLHQLGHDVRVFMPYYGFIGDKIDVPKEPVWKGEAMFQQFAVYQSYLPDTKIPLYLFGHPAFDSRRIYGGDDEAWRFTFFSNGAAEFAWNHWKPEIIHCHDWHTGMIPVWMHQSPDIATVFTIHNLAYQGPWRGLLETMTWCPWYMQGDNVMAAAIQFANRVTTVSPTYAQQIQTPAYGEKLEGLLSYLSGNLVGILNGIDTEIYNPAEDRFISNVFDADSLDKRVKNKIAIQEETGLEINRNAMVVGIVARLVEQKGIDLVIQILDRFMSYTDSQLIILGTGDRHYETQLWQMASRFPGRMAVQLLHNDALSRRVYAGADVFLMPSRFEPCGLSQLMAMRYGCIPIVRRTGGLVDTVSFYDPINEAGTGYCFDRYEPLDCFTAMVRAWEGFRFKADWQKLQQRAMRADFSWYRSAGEYIKVYKGVVGKPEELSPMEEEKIAELTASYR

SEQ ID NO: 95 - protein, 472 aa, Nostoc sp. PCC 7120
MRILFVAAEAAPIAKVGGMGDVVGALPKVLRKMGHDVRIFLPYYGFLPDKMEIPKDPIWKGYAMFQDFTVHEAVLPGTDVPLYLFGHPAFTPRRIYSGDDEDWRFTLFSNGAAEFCWNYWKPDIIHCHDWHTGMIPVWMNQSPDITTVFTIHNLAYQGPWRWYLDKITWCPWYMQGHNTMAAAVQFADRVNTVSPTYAEQIKTPAYGEKIEGLLSFISGKLSGIVNGIDTEVYDPANDKYIAQTFTADTLDKRKANKIALQEEVGLEVNSNAFLIGMVTRLVEQKGLDLVIQMLDRFMAYTDAQFVLLGTGDRYYETQMWQLASRYPGRMATYLLYNDALSRRIYAGTDAFLMPSRFEPCGISQMMALRYGSIPIVRRTGGLVDTVSHHDPINEAGTGYCFDRYEPLDLFTCMIRAWEGFRYKPQWQELQKRGMSQDFSWYKSAKEYDKLYRSMYGLPDPEETQPELILTNQ

SEQ ID NO: 96 - protein, 472 aa, Anabaena variabilis
MRILFVAAEAAPIAKVGGMGDVVGALPKVLRKMGHDVRIFLPYYGFLPDKMEIPKDPIWKGYAMFQDFTVHEAVLPGTDVPLYLFGHPAFNPRRIYSGDDEDWRFTLFSNGAAEFCWNYWKPEIIHCHDWHTGMIPVWMNQSPDITTVFTIHNLAYQGPWRWYLDKITWCPWYMQGHNTMAAAVQFADRVNTVSPTYAEQIKTPAYGEKIEGLLSFISGKLSGIVNGIDTEVYDPANDKFIAQTFTADTLDKRKANKIALQEEVGLEVNSNAFLIGMVTRLVEQKGLDLVIQMLDRFMAYTDAQFVLLGTGDRYYETQMWQLASRYPGRMATYLLYNDALSRRIYAGSDAFLMPSRFEPCGISQMMALRYGSIPIVRRTGGLVDTVSHHDPVNEAGTGYCFDRYEPLDLFTCMIRAWEGFRYKPQWQELQKRGMSQDFSWYKSAKEYDRLYRSIYGLPEAEETQPELILANQ

SEQ ID NO: 97 - protein, 460 aa, Trichodesmium erythraeum IMS 101
MRILFVSAEATPLAKVGGMADVVGALPKVLRKMGHDVRIFMPYYGFLGDKMEVPEEPIWEGTAMYQNFKIYETVLPKSDVPLYLFGHPAFWPRHIYYGDDEDWRFTLFANGAAEFCWNGWKPEIVHCNDWHTGMIPVWMHETPDIKTVFTIHNLAYQGPWRWYLERITWCPWYMEGHNTMAAAVQFADRVTTVSPTYASQIQTPAYGENLDGLMSFITGKLHGILNGIDMNFYNPANDRYIPQTYDVNTLEKRVDNKIALQEEVGFEVNKNSFLMGMVSRLVEQKGLDLMLQVLDRFMAYTDTQFILLGTGDRFYETQMWQIASRYPGRMSVQLLHNDALSRRIYAGTDAFLMPSRFEPCGISQLLAMRYGSIPIVRRTGGLVDTVSFYDPINNVGTGYSFDRYEPLDLLTAMVRAYEGFRFKDQWQELQKRGMRENFSWDKSAQGYIKMYKSMLGLPEE

SEQ ID NO: 98 - protein, 465 aa, Synechococcus elongatus PCC 7942
MRILFVAAECAPFAKVGGMGDVVGSLPKVLKALGHDVRIFMPYYGFLNSKLDIPAEPIWWGYAMFNHFAVYETQLPGSDVPLYLMGHPAFDPHRIYSGEDEDWRFTFFANGAAEFSWNYWKPQVIHCHDWHTGMIPVWMHQSPDISTVFTIHNLAYQGPWRWKLEKITWCPWYMQGDSTMAAALLYADRVNTVSPTYAQQIQTPTYGEKLEGLLSFISGKLSGILNGIDVDSYNPATDTRIVANYDRDTLDKRLNNKLALQKEMGLEVNPDRFLIGFVARLVEQKGIDLLLQILDRFLSYSDAQFVVLGTGERYYETQLWELATRYPGRMSTYLMYDEGLSRRIYAGSDAFLVPSRFEPCGITQMLALRYGSVPIVRRTGGLVDTVFHHDPRHAEGNGYCFDRYEPLDLYTCLVRAWESYQYQPQWQKLQQRGMAVDLSWKQSAIAYEQLYAEAIGLPIDVLQEA

SEQ ID NO: 99 - protein, 513 aa, Synechococcus sp. WH8102
MRILFAAAECAPMIKVGGMGDVVGSLPPALAKLGHDVRLIMPGYSKLWTKLTISDEPIWRAQTMGTEFAVYETKHPGNGMTIYLVGHPVFDPERIYGGEDEDWRFTFFASAAAEFAWNVWKPNVLHCHDWHTGMIPVWMHQDPEISTVFTIHNLKYQGPWRWKLDRITWCPWYMQGDHTMAAALLYADRVNAVSPTYAEEIRTAEYGEKLDGLLNFVSGKLRGILNGIDLEAWNPQTDGALPATFSADDLSGKAVCKRVLQERMGLEVRDDAFVLGMVSRLVDQKGVDLLLQVADRLLAYTDTQIVVLGTGDRGLESGLWQLASRHAGRCAVFLTYDDDLSRLIYAGSDAFLMPSRFEPCGISQLYAMRYGSVPVVRKVGGLVDTVPPHSPADASGTGFCFDRFEPVDFYTALVRAWEAYRHRDSWQELQKRGMQQDYSWDRSAIDYDVMYRDVCGLKEPTPDAAMVEQFSQGQAADPSRPEDDAINAAPEAVTAPSGPSRNPLNRLFGRRAD

SEQ ID NO: 100 - protein, 507 aa, Synechococcus sp RCC 307
MRILFAAAECAPMVKVGGMGDVVGSLPPALAELGHDVRVIMPGYGKLWSQLDVPSEPIWRAQTMGTDFAVYETRHPKTGLTIYLVGHPVFDGERIYGGEDEDWRFTFFASATSEFAWNAWKPQVLHCHDWHTGMIPVWMHQDPEISTVFTIHNLKYQGPWRWKLERMTWCPWYMQGDHTMAAALLYADRVNAVSPTYAQEIRTPEYGEQLEGLLNYISGKLRGILNGIDVEAWNPATDSRIPATYSTADLSGKAVCKRALQERMGLQVNPDTFVIGLVSRLVDQKGVDLLLQVAERFLAYTDTQIVVLGTGDRHLESGLWQMASQHSGRFASFLTYDDDLSRLIYAGSDAFLMPSRFEPCGISQLLSMRYGTIPVVRRVGGLVDTVPPYVPATQEGNGFCFDRYEAIDLYTALVRAWEAYRHQDSWQQLMKRVMQVDFSWARSALEYDRMYRDVCGMKEPTPEADAVAAFSIPQPPEQQAARAAAEAADPNPQRRFNPLGLLRRNGG

SEQ ID NO: 101 - protein, 478 aa, Synechococcus sp. PCC 7002
MRILFVSAEAAPIAKAGGMGDVVGSLPKVLRQLGHDARIFLPYYGFLNDKLDIPAEPVWWGSAMFNTFAVYETVLPNTDVPLYLFGHPAFDGRHIYGGQDEFWRFTFFANGAAEFMWNHWKPQIAHCHDWHTGMIPVWMHQSPDISTVFTIHNLAYQGPWRGFLERNTWCPWYMDGDNVMASALMFADQVNTVSPTYAQQIQTKVYGEKLEGLLSWISGKSRGIVNGIDVELYNPSNDQALVKQFSTTNLEDRAANKVIIQEETGLEVNSKAFLMAMVTRLVEQKGIDLLLNILEQFMAYTDAQLIILGTGDRHYETQLWQTAYRFKGRMSVQLLYNDALSRRIYAGSDVFLMPSRFEPCGISQMMAMRYGSVPIVRRTGGLVDTVSFHDPIHQTGTGFSFDRYEPLDMYTCMVRAWESFRYKKDWAELQRRGMSHDFSWYKSAGEYLKMYRQSIKEAPELTTDEAEKITYLVKKHAI

SEQ ID NO: 102 - DNA, 1380 bp, Synechococcus elongatus PCC 7942
atgactgctgtcgttctccctgctgccgctgaaacgctggctgctttacaagcaacctttgatcggggggatacacgcacgctcgccttccgactggcgcgattacaggatctggccaagctagttgctgacaatgaagcggagctattgcaagccttggcgtcagacctccgcaaaccagcactggaagcctacgccagtgagatttatttcgtgcgcgaccaaatcaaactgacctgcaagcatctgcggcgctggatgcaacccgagaagcagtcgatttccttgatgcagcagcctggccaggcctatcgccaagcagaaccgctcggagtcgtgctgatcattggcccctggaactatccctttcagctgctcatcacgccgttgattggggcgatcgcggcgggaaattgtgccgtactcaaaccatcggaactggctcccgcgacttccagcctgattcagcgactgatcagcgatcgctttgaccctgattacatccgcgttttagaaggcgatgctagcgttagccaagccctgattactcagcccttcgatcacatcttcttcactggcggcacggcgatcgggcgaaaagtgatggctgctgcggccgaaaacctgacgcccgtcaccctcgagttgggcggtaagtcaccctgcattgttgataccgatatcgacctcgatgtggccgcccgtcgcatcgcctggggcaaattcttcaacgccggtcaaacctgcattgcgcctgactatttgttggtgcaacgcacggtcgcagagccgttcattgaagcgctgatcgacaacatccagcagttctatggcgaggatccgcaacagagtgctgactacgcccgcattgtcagcgatcgccactggcaaaggctaaatagcctgttggttgatggcacgattcgccatggtggtcaggtggataggagcgatcgctacatcgcaccgactttaattacggacgtcaactggcgcgatcccatcctgcaagaggagatttttgggcccctcttgccgattttgatttacgaccaattggatgaggcgatcgcccaaattcgtgcccagcccaagcccctcgcgctctatctattcagccgcgatcgccaagtgcaagagcgcgtcctagcggaaaccagcgccggtagcgtctgcctcaacgacacgatcctgcaggtcggcgtccccgatgctgcttttggtggggtcggccccagcggcatgggcggctatcacggcaaagccagtttcgaaaccttcagtcactacaagctggtgctcaagcgaccgttttggctcgatctggccctgcgctatccgccctacggcgacaagatcaacctcttccgcaagctctag

SEQ ID NO: 103 - protein, 459 aa, Synechococcus elongatus PCC 7942
MTAVVLPAAAETLAALQATFDRGDTRTLAFRLARLQDLAKLVADNEAELLQALASDLRKPALEAYASEIYFVRDQIKLTCKHLRRWMQPEKQSISLMQQPGQAYRQAEPLGVVLIIGPWNYPFQLLITPLIGAIAAGNCAVLKPSELAPATSSLIQRLISDRFDPDYIRVLEGDASVSQALITQPFDHIFFTGGTAIGRKVMAAAAENLTPVTLELGGKSPCIVDTDIDLDVAARRIAWGKFFNAGQTCIAPDYLLVQRTVAEPFIEALIDNIQQFYGEDPQQSADYARIVSDRHWQRLNSLLVDGTIRHGGQVDRSDRYIAPTLITDVNWRDPILQEEIFGPLLPILIYDQLDEAIAQIRAQPKPLALYLFSRDRQVQERVLAETSAGSVCLNDTILQVGVPDAAFGGVGPSGMGGYHGKASFETFSHYKLVLKRPFWLDLALRYPPYGDKINLFRKL

SEQ ID NO: 104 - DNA, 1011 bp, Synechycystis sp. PCC6083
atgattaaagcctacgctgccctggaagccaacggaaaactccaaccctttgaatacgaccccggtgccctgggtgctaatgaggtggagattgaggtgcagtattgtggggtgtgccacagtgatttgtccatgattaataacgaatggggcatttccaattaccccctagtgccgggtcatgaggtggtgggtactgtggccgccatgggcgaaggggtgaaccatgttgaggtgggggatttagtggggctgggttggcattcgggctactgcatgacctgccatagttgtttatctggctaccacaacctttgtgccacggcggaatcgaccattgtgggccactacggtggctttggcgatcgggttcgggccaagggagtcagcgtggtgaaattacctaaaggcattgacctagccagtgccgggccccttttctgtggaggaattaccgttttcagtcctatggtggaactgagtttaaagcccactgcaaaagtggcagtgatcggcattgggggcttgggccatttagcggtgcaatttctccgggcctggggctgtgaagtgactgcctttacctccagtgccaggaagcaaacggaagtgttggaattgggcgctcaccacatactagattccaccaatccagaggcgatcgccagtgcggaaggcaaatttgactatattatctccactgtgaacctgaagcttgactggaacttatacatcagcaccctggcgccccagggacatttccactttgttggggtggtgttggagcctttggatctaaatctttttccccttttgatgggacaacgctccgtttctgcctccccagtgggtagtcccgccaccattgccaccatgttggactttgctgtgcgccatgacattaaacccgtggtggaacaatttagctttgatcagatcaacgaggcgatcgcccatctagaaagcggcaaagcccattatcgggtagtgctcagccatagtaaaaattag

SEQ ID NO: 105 - protein, 336 aa, Synechycystis sp. PCC6083
MIKAYAALEANGKLQPFEYDPGALGANEVEIEVQYCGVCHSDLSMINNEWGISNYPLVPGHEVVGTVAAMGEGVNHVEVGDLVGLGWHSGYCMTCHSCLSGYHNLCATAESTIVGHYGGFGDRVRAKGVSVVKLPKGIDLASAGPLFCGGITVFSPMVELSLKPTAKVAVIGIGGLGHLAVQFLRAWGCEVTAFTSSARKQTEVLELGAHHILDSTNPEAIASAEGKFDYIISTVNLKLDWNLYISTLAPQGHFHFVGVVLEPLDLNLFPLLMGQRSVSASPVGSPATIATMLDFAVRHDIKPVVEQFSFDQINEAIAHLESGKAHYRVVLSHSKN

SEQ ID NO: 106 - DNA, 1023 bp, Acinetobacter baylyi
atgacaactaatgtgattcatgcttatgctgcaatgcaggcaggtgaagcactcgtgccttattcgtttgatgcaggcgaactgcaaccacatcaggttgaagttaaagtcgaatattgtgggctgtgccattccgatgtctcggtactcaacaacgaatggcattcttcggtttatccagtcgtggcaggtcatgaagtgattggtacgattacccaactgggaagtgaagccaaaggactaaaaattggtcaacgtgttggtattggctggacggcagaaagctgtcaggcctgtgaccaatgcatcagtggtcagcaggtattgtgcacgggcgaaaataccgcaactattattggtcatgctggtggctttgcagataaggttcgtgcaggctggcaatgggtcattcccctgcccgacgaactcgatccgaccagtgctggtcctttgctgtgtggcggaatcacagtatttgatccaattttaaaacatcagattcaggctattcatcatgttgctgtgattggtatcggtggtttgggacatatggccatcaagctacttaaagcatggggctgtgaaattactgcgtttagttcaaatccaaacaaaaccgatgagctcaaagccatgggggccgatcacgtggtcaatagccgtgatgatgccgaaattaaatcgcaacagggtaaatttgatttactgctgagtacagttaatgtgcctttaaactggaatgcgtatctaaacacactggcacccaatggcactttccattttttgggcgtggtgatggaaccaatccctgtacctgtcggtgcgctgctaggaggtgccaaatcgctaacagcatcaccaactggctcgcctgctgccttacgtaagctgctcgaatttgcggcacgtaagaatatcgcacctcaaatcgagatgtatcctatgtcggagctgaatgaggccatcgaacgcttacattcgggtcaagcacgttatcggattgtacttaaagccgatttttaa

SEQ ID NO: 107 - protein, 340 aa, Acinetobacter baylyi
MTTNVIHAYAAMQAGEALVPYSFDAGELQPHQVEVKVEYCGLCHSDVSVLNNEWHSSVYPVVAGHEVIGTITQLGSEAKGLKIGQRVGIGWTAESCQACDQCISGQQVLCTGENTATIIGHAGGFADKVRAGWQWVIPLPDELDPTSAGPLLCGGITVFDPILKHQIQAIHHVAVIGIGGLGHMAIKLLKAWGCEITAFSSNPNKTDELKAMGADHVVNSRDDAEIKSQQGKFDLLLSTVNVPLNWNAYLNTLAPNGTFHFLGVVMEPIPVPVGALLGGAKSLTASPTGSPAALRKLLEFAARKNIAPQIEMYPMSELNEAIERLHSGQARYRIVLKADF

SEQ ID NO: 108 - protein, 415 aa, Cuphea hookeriana
MVAAAASSAFFPVPAPGASPKPGKFGNWPSSLSPSFKPKSIPNGGFQVKANDSAHPKANGSAVSLKSGSLNTQEDTSSSPPPRTFLHQLPDWSRLLTAITTVFVKSKRPDMHDRKSKRPDMLVDSFGLESTVQDGLVFRQSFSIRSYEIGTDRTASIETLMNHLQETSLNHCKSTGILLDGFGRTLEMCKRDLIWVVIKMQIKVNRYPAWGDTVEINTRFSRLGKIGMGRDWLISDCNTGEILVRATSAYAMMNQKTRRLSKLPYEVHQEIVPLFVDSPVIEDSDLKVHKFKVKTGDSIQKGLTPGWNDLDVNQHVSNVKYIGWILESMPTEVLETQELCSLALEYRRECGRDSVLESVTAMDPSKVGVRSQYQHLLRLEDGTAIVNGATEWRPKNAGANGAISTGKTSNGNSVS

SEQ ID NO: 109 - protein, 328 aa, Cuphea hookeriana [sequence omitted]

SEQ ID NO: 110 - protein, 382 aa, Umbellularia californica
MATTSLASAFCSMKAVMLARDGRGMKPRSSDLQLRAGNAPTSLKMINGTKFSYTESLKRLPDWSMLFAVITTIFSAAEKQWTNLEWKPKPKLPQLLDDHFGLHGLVFRRTFAIRSYEVGPDRSTSILAVMNHMQEATLNHAKSVGILGDGFGTTLEMSKRDLMWVVRRTHVAVERYPTWGDTVEVECWIGASGNNGMRRDFLVRDCKTGEILTRCTSLSVLMNTRTRRLSTIPDEVRGEIGPAFIDNVAVKDDEIKKLQKLNDSTADYIQGGLTPRWNDLDVNQHVNNLKYVAWVFETVPDSIFESHHISSFTLEYRRECTRDSVLRSLTTVSGGSSEAGLVCDHLLQLEGGSEVLRARTEWRPKLTDSFRGISVIPAEPRV

SEQ ID NO: 111 - protein, 324 aa, Umbellularia californica
MLPDWSMLFAVITTIFSAAEKQWTNLEWKPKPKLPQLLDDHFGLHGLVFRRTFAIRSYEVGPDRSTSILAVMNHMQEATLNHAKSVGILGDGFGTTLEMSKRDLMWVVRRTHVAVERYPTWGDTVEVECWIGASGNNGMRRDFLVRDCKTGEILTRCTSLSVLMNTRTRRLSTIPDEVRGEIGPAFIDNVAVKDDEIKKLQKLNDSTADYIQGGLTPRWNDLDVNQHVNNLKYVAWVFETVPDSIFESHHISSFTLEYRRECTRDSVLRSLTTVSGGSSEAGLVCDHLLQLEGGSEVLRARTEWRPKLTDSFRGISVIPAEPRV

SEQ ID NO: 112 - protein, 382 aa, Cinnamomum camphora
MATTSLASAFCSMKAVMLARDGRGMKPRSSDLQLRAGNAQTSLKMINGTKFSYTESLKKLPDWSMLFAVITTIFSAAEKQWTNLEWKPKPNPPQLLDDHFGPHGLVFRRTFAIRSYEVGPDRSTSIVAVMNHLQEAALNHAKSVGILGDGFGTTLEMSKRDLIWVVKRTHVAVERYPAWGDTVEVECWVGASGNNGRRHDFLVRDCKTGEILTRCTSLSVMMNTRTRRLSKIPEEVRGEIGPAFIDNVAVKDEEIKKPQKLNDSTADYIQGGLTPRWNDLDINQHVNNIKYVDWILETVPDSIFESHHISSFTIEYRRECTMDSVLQSLTTVSGGSSEAGLVCEHLLQLEGGSEVLRAKTEWRPKLTDSFRGISVIPAESSV

SEQ ID NO: 113 - protein, 324 aa, Cinnamomum camphora
MLPDWSMLFAVITTIFSAAEKQWTNLEWKPKPNPPQLLDDHFGPHGLVFRRTFAIRSYEVGPDRSTSIVAVMNHLQEAALNHAKSVGILGDGFGTTLEMSKRDLIWVVKRTHVAVERYPAWGDTVEVECWVGASGNNGRRHDFLVRDCKTGEILTRCTSLSVMMNTRTRRLSKIPEEVRGEIGPAFIDNVAVKDEEIKKPQKLNDSTADYIQGGLTPRWNDLDINQHVNNIKYVDWILETVPDSIFESHHISSFTIEYRRECTMDSVLQSLTTVSGGSSEAGLVCEHLLQLEGGSEVLRAKTEWRPKLTDSFRGISVIPAESSV

SEQ ID NO: 114 - protein, 415 aa, Cuphea hookeriana
MVATAASSAFFPLPSADTSSRPGKLGNKPSSLSPLKPKSTPNGGLQVKANASAPPKINGSPVGLKSGGLKTQEDAHSAPPPRTFINQLPDWSMLLAAITTVFLAAEKQWMMLDWKPKRPDMLVDPFGLGSIVQDGLVFRQNFSIRSYEIGADRTASIETVMNHLQETALNHVKIAGLSNDGFGRTPEMYKRDLIWVVAKMQVMVNRYPTWGDTVEVNTWVAKSGKNGMRRDWLISDCNTGEILTRASSVWVMMNQKTRRLSKIPDEVRNEIEPHFVDSPPVIEDDDRKLPKLDEKTADSIRKGLTPRWNDLDVNQHVNNVKYIGWILESTPPEVLETQELCSLTLEYRRECGRESVLESLTAMDPSGGGYGSQFQHLLRLEDGGEIVKGRTEWRPKNGVINGVVPTGESSPGDYS

SEQ ID NO: 115 - protein, 329 aa, Cuphea hookeriana
MLPDWSMLLAAITTVFLAAEKQWMMLDWKPKRPDMLVDPFGLGSIVQDGLVFRQNFSIRSYEIGADRTASIETVMNHLQETALNHVKIAGLSNDGFGRTPEMYKRDLIWVVAKMQVMVNRYPTWGDTVEVNTWVAKSGKNGMRRDWLISDCNTGEILTRASSVWVMMNQKTRRLSKIPDEVRNEIEPHFVDSPPVIEDDDRKLPKLDEKTADSIRKGLTPRWNDLDVNQHVNNVKYIGWILESTPPEVLETQELCSLTLEYRRECGRESVLESLTAMDPSGGGYGSQFQHLLRLEDGGEIVKGRTEWRPKNGVINGVVPTGESSPGDYS

SEQ ID NO: 116 - protein, 9 aa, Artificial Sequence
  Domain 1 lipid phosphatase catalytic motif
  VARIANT (2)..(2): Xaa = Any Amino Acid
  VARIANT (3)..(3): Xaa = Any Amino Acid
  VARIANT (4)..(4): Xaa = Any Amino Acid
  VARIANT (5)..(5): Xaa = Any Amino Acid
  VARIANT (6)..(6): Xaa = Any Amino Acid
  VARIANT (7)..(7): Xaa = Any Amino Acid
KXXXXXXRP

SEQ ID NO: 117 - protein, 4 aa, Artificial Sequence
  Domain 2 lipid phosphatase catalytic motif
PSGH

SEQ ID NO: 118 - protein, 12 aa, Artificial Sequence
  Domain 3 lipid phosphatase catalytic motif
  VARIANT (3)..(3): Xaa = Any Amino Acid
  VARIANT (4)..(4): Xaa = Any Amino Acid
  VARIANT (5)..(5): Xaa = Any Amino Acid
  VARIANT (6)..(6): Xaa = Any Amino Acid
  VARIANT (7)..(7): Xaa = Any Amino Acid
  VARIANT (9)..(9): Xaa = Any Amino Acid
  VARIANT (10)..(10): Xaa = Any Amino Acid
  VARIANT (11)..(11): Xaa = Any Amino Acid
SRXXXXXHXXXD

SEQ ID NO: 119 - DNA, 1250 bp, Rhodococcus sp.
atgacccgaggcttcgttctccggcaggccgtcggcgccgcactcgccgccaacgccctgcgtcccctgcccggtgcgcccacgtcggtggtcgcgttcttctcagggtggctcaccaccgaactcgcaccgcacctgctcgccgtgaccgccgccgacgccgcccagcacgccgcgcgtcacggaacgcgaacccgaagcgaccgtgtcggcctcgcgctggccgccgcatccgccgccgggctcgccgccgtgatcgccaccggtcgtggcgccggagcggaagccgaatccgcgctcgtcgagacgctcggcgagaactacaccgaccgcgacagcgccatcgaacacccggggcggcccgtgtggcggcaactcctcaacccgttctggatgcggaacaaagcggtcacccgggtccgcaacctcgcgtacgggccgggcgggcgccgggcccgcctcgacatctaccaccggcaggatctgccgtcgaagagcccggtcctcctgcagatccacggcggcggatgggtgatcgggaacaaggatcaacagggtctgccgctcatgctcgagatggcctcgcgggggtgggtgtgcgcggccgtcaactacccgctgtcgccgaaggcgaagtggcccgaacacctgatcgcaatcaagcaggcgctggcctggctccgggagcacgtcgaggagtacggcggcaaccccgacttcatcgccgtcacaggtggttccgcgggtggccacctcgccgccatggtgggactcaccgcgaacgacagtcacctgcagccggggttcgaggacgtcgacacgtccgttcaggcgtgtgtcccgtactacggtgtctacgacatcgccggcgacaccggaatcaaggcggtcctccagcgcgtgcactccggactgatgccgatggtgctcggcaagcacgccacgttccccgacgactaccgggccgcgtccccgctcgcgcacctgcgggcggacgcaccgccgttcttcgtgattcacggcacgagcgattcgctgatccccgtcgccgaggcgcggatcttcgtcgacgagctccggcaggtgtccgacaaccccgtcgtctacgccgaattgaagggcgcgcagcacgcgttcgacgtgttcccctcgatccgcagcatctccgtcacgcaggcggtcgggcgcttcctggaatggtcgcgcagcgccaccaccgacgtgcccgcggcgggcacggaatcggcctg

SEQ ID NO: 120 - protein, 416 aa, Rhodococcus sp.
MTRGFVLRQAVGAALAANALRPLPGAPTSVVAFFSGWLTTELAPHLLAVTAADAAQHAARHGTRTRSDRVGLALAAASAAGLAAVIATGRGAGAEAESALVETLGENYTDRDSAIEHPGRPVWRQLLNPFWMRNKAVTRVRNLAYGPGGRRARLDIYHRQDLPSKSPVLLQIHGGGWVIGNKDQQGLPLMLEMASRGWVCAAVNYPLSPKAKWPEHLIAIKQALAWLREHVEEYGGNPDFIAVTGGSAGGHLAAMVGLTANDSHLQPGFEDVDTSVQACVPYYGVYDIAGDTGIKAVLQRVHSGLMPMVLGKHATFPDDYRAASPLAHLRADAPPFFVIHGTSDSLIPVAEARIFVDELRQVSDNPVVYAELKGAQHAFDVFPSIRSISVTQAVGRFLEWSRSATTDVPAAGTESA

SEQ ID NO: 121 - protein, 183 aa, Escherichia coli
MADTLLILGDSLSAGYRMSASAAWPALLNDKWQSKTSVVNASISGDTSQQGLARLPALLKQHQPRWVLVELGGNDGLRGFQPQQTEQTLRQILQDVKAANAEPLLMQIRLPANYGRRYNEAFSAIYPKLAKEFDVPLLPFFMEEVYLKPQWMQDDGIHPNRDAQPFIADWMAKQLQPLVNHDS

SEQ ID NO: 122 - DNA, 987 bp, Artificial Sequence
  Codon optimized polynucleotide encoding mature form of C8/C10FatB
atgctgccagattggagccgactcttgaccgccatcaccacagtctttgttaagtctaaacggcccgacatgcacgatcgaaaaagcaagcgccccgatatgctggtggacagctttggcttggaatctaccgtgcaggatgggttggtctttcgacagagtttctcgattcgcagttatgaaattggcactgatcgtacggcaagcattgagactctgatgaaccacttgcaagagacaagcttgaaccattgcaaatcgacagggattctcctcgatggcttcggtcgtacgctggaaatgtgcaagcgcgatctgatttgggttgtgatcaaaatgcagattaaggttaaccgttatcccgcatggggtgatacggtggaaattaacacgcggttctcccgcctgggaaaaatcggcatgggacgcgattggctgatctccgattgcaacacgggcgagatcctcgtgcgcgctacttcggcctacgccatgatgaatcaaaaaacccggcgcctcagtaagctgccctacgaggtgcaccaagaaattgttccgttgtttgtggatagccctgtcatcgaggattcggatctgaaggtccataaattcaaagttaaaacgggagactcgatccaaaagggcttgacgccgggttggaatgacctggacgtcaatcagcatgtttcgaacgtgaaatacatcggctggattctggagtccatgccaaccgaagtgttggaaacccaggagttgtgttcgctcgctctcgaataccggcgcgaatgtggccgtgatagtgttctcgagagtgtcaccgccatggaccctagcaaagtcggggtgcgctctcagtatcaacacctgttgcgcttggaagacggcacagcgatcgtgaatggtgcgaccgagtggcgtccgaagaacgccggtgcgaatggtgcaatttcgactgggaagaccagcaatggtaatagtgtcagttag

SEQ ID NO: 123 - DNA, 1561 bp, Umbellularia californica
agagagagagagagagagagagctaaattaaaaaaaaaacccagaagtgggaaatcttccccatgaaataacggatcctcttgctactgctactactactactacaaactgtagccatttatataattctatataattttcaacatggccaccacctctttagcttccgctttctgctcgatgaaagctgtaatgttggctcgtgatggccggggcatgaaacccaggagcagtgatttgcagctgagggcgggaaatgcgccaacctctttgaagatgatcaatgggaccaagttcagttacacggagagcttgaaaaggttgcctgactggagcatgctctttgcagtgatcacaaccatcttttcggctgctgagaagcagtggaccaatctagagtggaagccgaagccgaagctaccccagttgcttgatgaccattttggactgcatgggttagttttcaggcgcacctttgccatcagatcttatgaggtgggacctgaccgctccacatctatactggctgttatgaatcacatgcaggaggctacacttaatcatgcgaagagtgtgggaattctaggagatggattcgggacgacgctagagatgagtaagagagatctgatgtgggttgtgagacgcacgcatgttgctgtggaacggtaccctacttggggtgatactgtagaagtagagtgctggattggtgcatctggaaataatggcatgcgacgtgatttccttgtccgggactgcaaaacaggcgaaattcttacaagatgtaccagcctttcggtgctgatgaatacaaggacaaggaggttgtccacaatccctgacgaagttagaggggagatagggcctgcattcattgataatgtggctgtcaaggacgatgaaattaagaaactacagaagctcaatgacagcactgcagattacatccaaggaggtttgactcctcgatggaatgatttggatgtcaatcagcatgtgaacaacctcaaatacgttgcctgggtttttgagaccgtcccagactccatctttgagagtcatcatatttccagcttcactcttgaatacaggagagagtgcacgagggatagcgtgctgcggtccctgaccactgtctctggtggctcgtcggaggctgggttagtgtgcgatcacttgctccagcttgaaggtgggtctgaggtattgagggcaagaacagagtggaggcctaagcttaccgatagtttcagagggattagtgtgatacccgcagaaccgagggtgtaactaatgaaagaagcatctgttgaagtttctcccatgctgttcgtgaggatactttttagaagctgcagtttgcattgcttgtgcagaatcatggtctgtggttttagatgtatataaaaaatagtcctgtagtcatgaaacttaatatcagaaaaataactcaatgggtcaaggttatcgaagtagtcatttaagctttgaaatatgttttgtattcctcggcttaatctgtaagctctttctcttgcaataaagttcgcctttcaat

SEQ ID NO: 124 - DNA, 975 bp, Artificial Sequence
  Codon optimized polynucleotide encoding mature form of C12FatB1 from Umbellularia californica
atgctgccggattggagtatgttgttcgcggtcattaccaccatcttctcggccgcggaaaagcagtggactaatctcgaatggaagcccaagcctaaattgccgcaactgttggatgatcactttggtctgcatggcctggtcttccgacgaactttcgccatccgctcttacgaggtcggtccagatcgatcgacgtccattctggcggtgatgaaccacatgcaggaagctacactgaatcacgccaagagtgtcggcatcctgggcgatggttttggtacgacgctcgagatgagtaagcgcgatttgatgtgggtggtccgccgcacacatgtggccgtcgaacgctatcctacgtggggtgacacggtcgaagtcgagtgttggatcggagccagcggcaataatgggatgcggcgcgattttctcgtgcgggattgtaagaccggtgaaattctgacacgttgcaccagcctctccgtcctgatgaacacgcggactcgccgcctgtcgactatcccggatgaagtgcgcggcgaaattgggcccgcatttatcgacaatgttgctgtcaaggatgacgagattaaaaaactgcaaaaactcaacgatagcactgccgattacattcaaggcggactcacgccgcgttggaacgacctcgacgttaaccagcacgtgaacaacctcaaatacgtggcatgggtcttcgaaaccgttccagacagcatcttcgaatctcatcatatcagctcgttcacgttggagtatcgtcgtgagtgcacccgggattccgtgttgcgatctctgaccaccgtttccgggggcagcagcgaggctggactcgtttgcgaccacctgctgcaattggaaggcggctcggaggtgctgcgagcacggaccgaatggcgcccgaaattgacggatagctttcggggcattagtgttatccccgccgagccccgcgtttag

SEQ ID NO: 125 - DNA, 975 bp, Artificial Sequence
  Codon optimized polynucleotide encoding mature form of C14FatB1 from Cinnamomum camphora
atgttgcccgattggagcatgttgttcgcagtcatcaccaccattttcagcgcagcggagaagcaatggaccaatttggagtggaaaccaaagccgaatccccctcagctgctggatgatcattttggaccccacgggttggtctttcgccgaacgtttgccatccgcagctatgaagtgggcccggatcgctcgacgagcattgttgctgttatgaatcacctgcaagaagcggctctgaatcatgctaagagcgtgggtatcttgggcgacggtttcgggacaactctggagatgtcgaagcgcgatctgatctgggtggtcaaacgtacccatgtggctgttgaacggtacccggcctggggagatactgtggaggttgagtgctgggttggcgcaagcggcaataacggccgccgacatgatttcctcgtgcgcgactgtaaaaccggcgaaattttgacccgatgcacctcgctcagtgtcatgatgaacacgcgcactcgtcggctgtccaaaatccccgaggaagtccgtggcgagatcggaccggcgttcattgacaacgtggcagtgaaggacgaagaaattaaaaagccgcagaagctgaacgattccacagcggattacatccagggtggtctgacgccccggtggaacgacctcgacattaaccagcacgtcaataacattaagtacgtggattggatcttggaaacagtgccggattcgatttttgagtcgcatcatatcagcagttttacgatcgaatatcgccgcgaatgtacgatggatagcgtgttgcagagcctcacgacagtctctggggggagtagtgaggccggtctggtctgcgaacacctgctccaactcgaaggcggttctgaagtgctccgtgccaaaactgagtggcgccctaaactcactgactcgtttcggggtatttccgtcattccagccgagtccagtgtttag

SEQ ID NO: 126 - DNA, 1430 bp, Cinnamomum camphora
tcaacatggccaccacctctttagcttctgctttctgctcgatgaaagctgtaatgttggctcgtgatggcaggggcatgaaacccaggagcagtgatttgcagctgagggcgggaaatgcacaaacctctttgaagatgatcaatgggaccaagttcagttacacagagagcttgaaaaagttgcctgactggagcatgctctttgcagtgatcacgaccatcttttcggctgctgagaagcagtggaccaatctagagtggaagccgaagccgaatccaccccagttgcttgatgaccattttgggccgcatgggttagttttcaggcgcacctttgccatcagatcgtatgaggtgggacctgaccgctccacatctatagtggctgttatgaatcacttgcaggaggctgcacttaatcatgcgaagagtgtgggaattctaggagatggattcggtacgacgctagagatgagtaagagagatctgatatgggttgtgaaacgcacgcatgttgctgtggaacggtaccctgcttggggtgatactgttgaagtagagtgctgggttggtgcatcgggaaataatggcaggcgccatgatttccttgtccgggactgcaaaacaggcgaaattcttacaagatgtaccagtctttcggtgatgatgaatacaaggacaaggaggttgtccaaaatccctgaagaagttagaggggagatagggcctgcattcattgataatgtggctgtcaaggacgaggaaattaagaaaccacagaagctcaatgacagcactgcagattacatccaaggaggattgactcctcgatggaatgatttggatatcaatcagcacgttaacaacatcaaatacgttgactggattcttgagactgtcccagactcaatctttgagagtcatcatatttccagcttcactattgaatacaggagagagtgcacgatggatagcgtgctgcagtccctgaccactgtctccggtggctcgtcggaagctgggttagtgtgcgagcacttgctccagcttgaaggtgggtctgaggtattgagggcaaaaacagagtggaggcctaagcttaccgatagtttcagagggattagtgtgatacccgcagaatcgagtgtctaactaacgaaagaagcatctgatgaagtttctcctgtgctgttgttcgtgaggatgctttttagaagctgcagtttgcattgcttgtgcagaatcatggcctgtggttttagatatatatccaaaattgtcctatagtcaagaaacttaatatcagaaaaataactcaatgagtcaaggttatcgaagtagtcatgtaagctttgaaatatgttgtgtattcctcggctttatgtaatctgtaagctctttctcttgcaataaatttcgcctttcaat

SEQ ID NO: 127 - DNA, 1744 bp, Cuphea hookeriana
ctttgatcggtcgatcctttcctctcgctcataatttacccattagtcccctttgccttctttaaaccctcctttcctttctcttcccttcttcctctctgggaagtttaaagcttttgcctttctcccccccacaacctctttcccgcatttgttgagctgtttttttgtcgccattcgtcctctcctcttcagttcaacagaaatggtggctaccgctgcaagttctgcattcttccccctcccatccgccgacacctcatcgagacccggaaagctcggcaataagccatcgagcttgagccccctcaagcccaaatcgacccccaatggcggtttgcaggttaaggcaaatgccagtgcccctcctaagatcaatggttccccggtcggtctaaagtcgggcggtctcaagactcaggaagacgctcattcggcccctcctccgcgaacttttatcaaccagttgcctgattggagtatgcttcttgctgcaatcacgactgtcttcttggctgcagagaagcaatggatgatgcttgattggaaacctaagaggcctgacatgcttgtggacccgtttggattgggaagtattgttcaggatgggcttgtgttcaggcagaatttttcgattaggtcctatgaaataggcgccgatcgcactgcgtctatagagacggtgatgaaccatttgcaggaaacagctctcaatcatgttaagattgctgggctttctaatgacggctttggtcgtactcctgagatgtataaaagggaccttatttgggttgttgcgaaaatgcaagtcatggttaaccgctatcctacttggggtgacacggttgaagtgaatacttgggttgccaagtcagggaaaaatggtatgcgtcgtgactggctcataagtgattgcaatactggagagattcttacaagagcatcaagcgtgtgggtcatgatgaatcaaaagacaagaagattgtcaaaaattccagatgaggttcgaaatgagatagagcctcattttgtggactctcctcccgtcattgaagacgatgaccggaaacttcccaagctggatgagaagactgctgactccatccgcaagggtctaactccgaggtggaatgacttggatgtcaatcaacacgtcaacaacgtgaagtacatcgggtggattcttgagagtactccaccagaagttctggagacccaggagttatgttcccttactctggaatacaggcgggaatgtggaagggagagcgtgctggagtccctcactgctatggatccctctggagggggttatgggtcccagtttcagcaccttctgcggcttgaggatggaggtgagatcgtgaaggggagaactgagtggcggcccaagaatggtgtaatcaatggggtggtaccaaccggggagtcctcacctggagactactcttagaagggagccctgacccctttggagttgtgatttctttattgtcggacgagctaagtgaagggcaggtaagatagtagcaatcggtagattgtgtagtttgtttgctgctttttcacgatggctctcgtgtataatatcatggtctgtcttctttgtatcctcttcttcgcatgttccgggttgattcatacattatattctttctatttgtttgaaggcgagtagcgggttgtaattatttattttgtcattacaatgtcgtttaacttttcaaatgaaactacttatgtg

SEQ ID NO: 128 - DNA, 990 bp, Artificial Sequence
  Codon optimized polynucleotide encoding mature form of C16FatB1 from Cuphea hookeriana
atgctgcctgactggtcgatgctgttggctgcaattactaccgtcttcctggcggctgaaaaacaatggatgatgttggactggaagcccaaacgacccgatatgctcgtcgatccgttcgggttgggcagcatcgttcaagacggtctggtgtttcgccaaaatttttccattcgatcttatgaaatcggcgctgaccggacagcatccatcgaaacggtcatgaaccatctccaagagaccgccctgaatcacgtgaagattgccggactctccaatgatggattcggccggaccccggaaatgtacaaacgcgatctgatctgggtggtcgccaagatgcaggtcatggtcaatcggtacccgacctggggggacacggttgaggtcaacacttgggtggcgaaatcgggtaagaacggcatgcgccgcgactggctcattagcgactgcaatacgggcgagatcctcacgcgtgccagttctgtgtgggtcatgatgaaccagaaaactcgacgcttgagcaagattccagatgaagttcgtaatgagattgaacctcattttgttgactcgccccccgtgatcgaggatgatgatcggaagctccccaagctggacgaaaaaacggcggatagcatccgcaaaggcctgacaccacggtggaacgatctggatgtcaatcaacacgtgaacaacgtgaaatacatcgggtggattctcgaatctacccccccagaagttctcgagactcaggagctgtgcagcttgacgttggagtaccgccgagaatgtggccgtgagtcggtgctggagagtctgaccgcaatggacccgtcgggcggtggttatggcagtcagtttcagcatttgctgcgcttggaggatggtggggaaattgtgaaaggtcggactgaatggcgccccaagaatggagtgattaatggtgttgtccctacaggcgaaagtagccccggggattatagttag

SEQ ID NO: 129 - DNA, 2595 bp, Artificial Sequence
  Codon-optimized S. cerevisiae phosphatidate phosphatase (PAH1)
atggaattccaatatgttggtcgggctttgggtagtgttagtaaaacgtggtcgagtatcaaccccgccaccctgagcggcgctatcgatgtcattgtcgtggaacaccccgatggccggctcagttgtagccccttccatgtgcgctttggtaaattccagattctgaaacccagccaaaagaaagtccaggtctttattaacgagaaactgtcgaatatgcccatgaaactctcggatagcggcgaggcgtacttcgtttttgagatgggtgatcaagtgacggatgtcccggatgaactgctcgtctcgccggtcatgagtgccacgagtagtccgccccaatcgccggaaacctcgattctcgaaggcggtaccgaaggcgagggcgaaggtgagaatgaaaataagaaaaaggaaaagaaggtgttggaggagcccgactttctggacattaatgacaccggtgacagcggcagcaagaacagtgagacgacgggttcgctctcgccgaccgaaagtagtacgacgacgccgcccgatagcgtcgaggaacgcaagttggtcgaacaacggaccaagaattttcagcaaaagctgaataagaaactgaccgaaatccatattccgagcaaattggacaataacggtgatttgctcctggacaccgagggttataagccgaataaaaacatgatgcacgacacggatattcagctgaagcaattgctcaaggatgagttcggtaacgatagcgatatttcgagcttcatcaaagaagacaagaatggcaacattaaaatcgtgaacccctatgagcatttgaccgatttgagtcccccgggtacgcccccgaccatggccacgagtggcagtgtcctgggcttggatgcgatggagagtggttcgacgctgaacagcttgagcagcagcccgagcggcagtgacaccgaggatgagacgagctttagcaaggaacagtcgtcgaagagtgaaaaaacgtcgaagaaaggcaccgcgggttcgggtgaaacggagaaacgctacatccgcacgatccggctcacgaatgatcagctgaaatgcctcaacttgacgtacggtgaaaatgacttgaaatttagtgttgaccatggcaaagccattgtgaccagcaaattgtttgtctggcgctgggacgtccccatcgttatcagcgacattgacggtacgattacgaaaagtgatgcgctgggccacgtcctcgccatgatcggcaaagattggacccatctcggcgtcgctaagctgttcagtgagatctcgcgcaacggttacaatatcctgtacctgaccgcgcgctcggccggtcaggctgacagtacccgctcgtatctccgcagtattgagcagaacggtagcaagctcccgaacggccccgtcattctgagccccgatcggaccatggctgccctgcgccgggaggtgattctgaaaaagcccgaagtctttaaaatcgcttgcttgaacgatatccgctcgctctatttcgaagactcggataacgaagtggacacggaggaaaagagcacgccgtttttcgcgggctttggcaatcggatcaccgatgcgctcagctatcggacggtcggcatcccgagtagccgcatcttcacgattaacacggaaggcgaggtgcacatggagctgctcgagctcgccggttaccggagtagctatatccatatcaacgaactggtcgatcacttcttcccgccggtgagcctggactcggtcgatctgcgcacgaacacgagcatggtcccgggcagcccgccgaaccgcaccctggataactttgatagcgaaatcaccagtggccgcaagacgttgtttcgcggtaatcaggaggaaaaattcacggacgtcaacttttggcgcgatccgttggtggacatcgacaacctctcggatatcagtaacgatgattcggacaatattgatgaagacaccgatgtgagccaacagtcgaacatcagccgcaaccgcgctaactcggtcaagacggccaaggtgaccaaggctccgcagcggaatgtgtcgggcagtacgaataacaatgaagttctggctgcgagtagtgatgttgaaaatgccagtgacttggttagcagccactcgagtagcggctcgacccccaacaagtcgacgatgagtaagggtgatatcggcaaacaaatctatctggaactgggctcgcccttggcgagtcccaaactccggtatctggacgatatggatgatgaggactcgaactataatcgcaccaagagccgccgggctagtagcgccgctgctaccagcatcgacaaggagtttaaaaagctcagtgtgagtaaagctggcgctcccacccgcatcgttagcaagatcaacgtgtcgaatgatgtgcacagtttgggcaacagtgataccgaaagccggcgggaacagagcgtcaatgaaaccggtcgcaatcagttgccgcacaatagtatggatgataaggatttggattcgcgggtgagtgacgagttcgatgacgatgagtttgatgaagatgagtttgaggattag

SEQ ID NO: 130 - DNA, 2589 bp, Artificial Sequence
  Synthetic construct Saccharomyces cerevisiae clone FLH148377.01X SMP2 gene
atgcagtacgtaggcagagctcttgggtctgtgtctaaaacatggtcttctatcaatccggctacgctatcaggtgctatagatgtcattgtagtggagcatccagacggaaggctatcatgttctccctttcatgtgaggttcggcaaatttcaaattctaaagccatctcaaaagaaagtccaagtgtttataaatgagaaactgagtaatatgccaatgaaactgagtgattctggagaagcctatttcgttttcgagatgggtgaccaggtcactgatgtccctgacgaattgcttgtgtcgcccgtgatgagcgccacatcaagcccccctcaatcacctgaaacatccatcttagaaggaggaaccgagggtgaaggtgaaggtgaaaatgaaaataagaagaaggaaaagaaagtgctagaggaaccagattttttagatatcaatgacactggagattcaggcagtaaaaatagtgaaactacagggtcgctttctcctactgaatcctctacaacgacaccaccagattcagttgaagagaggaagcttgttgagcagcgtacaaagaactttcagcaaaaactaaacaaaaaactcactgaaatccatatacccagtaaacttgataacaatggcgacttactactagacactgaaggttacaagccaaacaagaatatgatgcatgacacagacatacaactgaagcagttgttaaaggacgaattcggtaatgattcagatatttccagttttatcaaggaggacaaaaatggcaacatcaagatcgtaaatccttacgagcaccttactgatttatctcctccaggtacgcctccaacaatggccacaagcggatcagttttaggcttagatgcaatggaatcaggaagtactttgaattcgttatcttcttcaccttctggttccgatactgaggacgaaacatcatttagcaaagaacaaagcagtaaaagtgaaaaaactagcaagaaaggaacagcagggagcggtgagaccgagaaaagatacatacgaacgataagattgactaatgaccagttaaagtgcctaaatttaacttatggtgaaaatgatctgaaattttccgtagatcacggaaaagctattgttacgtcaaaattattcgtttggaggtgggatgttccaattgttatcagtgatattgatggcaccatcacaaaatcggacgctttaggccatgttctggcaatgataggaaaagactggacgcacttgggtgtagccaagttatttagcgagatctccaggaatggctataatatactctatctaactgcaagaagtgctggacaagctgattccacgaggagttatttgcgatcaattgaacagaatggcagcaaactaccaaatgggcctgtgattttatcacccgatagaacgatggctgcgttaaggcgggaagtaatactaaaaaaacctgaagtctttaaaatcgcgtgtctaaacgacataagatccttgtattttgaagacagtgataacgaagtggatacagaggaaaaatcaacaccattttttgccggctttggtaataggattactgatgctttatcttacagaactgtggggatacctagttcaagaattttcacaataaatacagagggtgaggttcatatggaattattggagttagcaggttacagaagctcctatattcatatcaatgagcttgtcgatcatttctttccaccagtcagccttgatagtgtcgatctaagaactaatacttccatggttcctggctccccccctaatagaacgttggataactttgactcagaaattacttcaggtcgcaaaacgctatttagaggcaatcaggaagagaaattcacagacgtaaatttttggagagacccgttagtcgacatcgacaacttatcggatattagcaatgatgattctgataacatcgatgaagatactgacgtatcacaacaaagcaacattagtagaaatagggcaaattcagtcaaaaccgccaaggtcactaaagccccgcaaagaaatgtgagcggcagcacaaataacaacgaagttttagccgcttcgtctgatgtagaaaatgcgtctgacctggtgagttcccatagtagctcaggatccacgcccaataaatctacaatgtccaaaggggacattggaaaacaaatatatttggagctaggttctccacttgcatcgccaaaactaagatatttagacgatatggatgatgaagactccaattacaatagaactaaatcaaggagagcatcttctgcagccgcgactagtatcgataaagagttcaaaaagctctctgtgtcaaaggccggcgctccaacaagaattgtttcaaagatcaacgtttcaaatgacgtacattcacttgggaattcagataccgaatcacgaagggagcaaagtgttaatgaaacagggcgcaatcagctaccccacaactcaatggacgataaagatttggattcaagagtaagcgatgaattcgatgacgatgaattcgacgaagatgaattcgaagattag

SEQ ID NO: 131 - protein, 864 aa, Saccharomyces cerevisiae
MEFQYVGRALGSVSKTWSSINPATLSGAIDVIVVEHPDGRLSCSPFHVRFGKFQILKPSQKKVQVFINEKLSNMPMKLSDSGEAYFVFEMGDQVTDVPDELLVSPVMSATSSPPQSPETSILEGGTEGEGEGENENKKKEKKVLEEPDFLDINDTGDSGSKNSETTGSLSPTESSTTTPPDSVEERKLVEQRTKNFQQKLNKKLTEIHIPSKLDNNGDLLLDTEGYKPNKNMMHDTDIQLKQLLKDEFGNDSDISSFIKEDKNGNIKIVNPYEHLTDLSPPGTPPTMATSGSVLGLDAMESGSTLNSLSSSPSGSDTEDETSFSKEQSSKSEKTSKKGTAGSGETEKRYIRTIRLTNDQLKCLNLTYGENDLKFSVDHGKAIVTSKLFVWRWDVPIVISDIDGTITKSDALGHVLAMIGKDWTHLGVAKLFSEISRNGYNILYLTARSAGQADSTRSYLRSIEQNGSKLPNGPVILSPDRTMAALRREVILKKPEVFKIACLNDIRSLYFEDSDNEVDTEEKSTPFFAGFGNRITDALSYRTVGIPSSRIFTINTEGEVHMELLELAGYRSSYIHINELVDHFFPPVSLDSVDLRTNTSMVPGSPPNRTLDNFDSEITSGRKTLFRGNQEEKFTDVNFWRDPLVDIDNLSDISNDDSDNIDEDTDVSQQSNISRNRANSVKTAKVTKAPQRNVSGSTNNNEVLAASSDVENASDLVSSHSSSGSTPNKSTMSKGDIGKQIYLELGSPLASPKLRYLDDMDDEDSNYNRTKSRRASSAAATSIDKEFKKLSVSKAGAPTRIVSKINVSNDVHSLGNSDTESRREQSVNETGRNQLPHNSMDDKDLDSRVSDEFDDDEFDEDEFED

SEQ ID NO: 132 - DNA, 861 bp, Escherichia coli
atgagtcaggcgctaaaaaatttactgacattgttaaatctggaaaaaattgaggaaggactctttcgcggccagagtgaagatttaggtttacgccaggtgtttggcggccaggtcgtgggtcaggccttgtatgctgcaaaagagaccgtccctgaagagcggctggtacattcgtttcacagctactttcttcgccctggcgatagtaagaagccgattatttatgatgtcgaaacgctgcgtgacggtaacagcttcagcgcccgccgggttgctgctattcaaaacggcaaaccgattttttatatgactgcctctttccaggcaccagaagcgggtttcgaacatcaaaaaacaatgccgtccgcgccagcgcctgatggcctcccttcggaaacgcaaatcgcccaatcgctggcgcacctgctgccgccagtgctgaaagataaattcatctgcgatcgtccgctggaagtccgtccggtggagtttcataacccactgaaaggtcacgtcgcagaaccacatcgtcaggtgtggatccgcgcaaatggtagcgtgccggatgacctgcgcgttcatcagtatctgctcggttacgcttctgatcttaacttcctgccggtagctctacagccgcacggcatcggttttctcgaaccggggattcagattgccaccattgaccattccatgtggttccatcgcccgtttaatttgaatgaatggctgctgtatagcgtggagagcacctcggcgtccagcgcacgtggctttgtgcgcggtgagttttatacccaagacggcgtactggttgcctcgaccgttcaggaaggggtgatgcgtaatcacaattaa

SEQ ID NO: 133 - protein, 208 aa, Escherichia coli
MMNFNNVFRWHLPFLFLVLLTFRAAAADTLLILGDSLSAGYRMSASAAWPALLNDKWQSKTSVVNASISGDTSQQGLARLPALLKQHQPRWVLVELGGNDGLRGFQPQQTEQTLRQILQDVKAANAEPLLMQIRLPANYGRRYNEAFSAIYPKLAKEFDVPLLPFFMEEVYLKPQWMQDDGIHPNRDAQPFIADWMAKQLQPLVNHDS

SEQ ID NO: 134 - protein, 286 aa, Escherichia coli
MSQALKNLLTLLNLEKIEEGLFRGQSEDLGLRQVFGGQVVGQALYAAKETVPEERLVHSFHSYFLRPGDSKKPIIYDVETLRDGNSFSARRVAAIQNGKPIFYMTASFQAPEAGFEHQKTMPSAPAPDGLPSETQIAQSLAHLLPPVLKDKFICDRPLEVRPVEFHNPLKGHVAEPHRQVWIRANGSVPDDLRVHQYLLGYASDLNFLPVALQPHGIGFLEPGIQIATIDHSMWFHRPFNLNEWLLYSVESTSASSARGFVRGEFYTQDGVLVASTVQEGVMRNHN

SEQ ID NO: 135 - DNA, 1023 bp, Escherichia coli
atgtttcagcagcaaaaagactgggaaacaagagaaaacgcgtttgctgcttttaccatgggaccgctgactgatttctggcgtcagcgtgatgaagcagagtttactggtgtggatgacattccggtgcgctttgtccgttttcgcgcacagcaccatgaccgggtggtagtcatctgcccggggcgtattgagagctacgtaaaatatgcggaactggcctatgacctgttccatttggggtttgatgtcttaatcatcgaccatcgcgggcagggacgttccggtcgcctgttagccgatccgcatctcgggcatgttaatcgctttaatgattatgttgatgatctggcggcattctggcagcaggaggttcagcccggtccgtggcgtaaacgctatatactggcacattcgatgggcggtgcgatctccacattatttctgcaacgccatccaggtgtatgtgacgccattgcgctaactgcgccaatgtttgggatcgtgattcgtatgccgtcatttatggcacggcagatcctcaactgggccgaagcgcatccacgtttccgtgatggctatgcaataggcaccgggcgctggcgcgcgttgccgtttgctatcaacgtactgacccacagcagacagcgatatcgacgtaacttacgcttctatgctgatgacccaacgattcgcgtcggtgggccgacctaccattgggtacgcgaaagtattctggctggcgaacaggtgttagccggtgcgggtgatgacgccacgccaacgcttctcttgcaggctgaagaggaacgcgtggtggataaccgcatgcatgaccgtttttgtgaactccgcaccgccgcgggccatcctgtcgaaggaggacggccgttggtaattaaaggtgcttaccatgagatcctttttgaaaaggacgcaatggcctcagtcgcgctccacgccatcgttgattttttcaacaggcataactcacccagcggaaaccgctctacagaggtttaa

SEQ ID NO: 136 - DNA, 1203 bp, Artificial Sequence
  Vupat1 - nucleotide sequence codon optimized for S. elongatus 7942.
atggccgccacacagacccctagtaaagttgacgatggtgcactgattacggtgctctcgattgacggggggggtatccgcgggatcatccctgggattctcctcgcgttcctcgagagcgaattgcaaaaactggatggtgctgatgcccgtctcgccgactactttgatgtcatcgcaggcacttctaccggaggcttggttactgctatgctgaccgcgccaaatgagaataatcgccccctctacgctgctaaagatattaaagatttctatctcgaacacaccccaaaaatctttccgcagtcgtcgagctggaacctgattgccaccgcgatgaagaagggccgcagcctgatggggccacagtacgacggcaaatacctgcataaattggtccgtgaaaaactgggcaatacgaagctcgagcacactctgaccaacgtggtcatcccggcgttcgacatcaaaaatctgcaacccgccattttcagtagcttccaagttaagaaacgcccctacctcaatgcagccctcagcgacatttgtatctcgaccagcgctgcacccacgtatctgccagcgcactgctttgaaacaaagacttcgacggccagtttcaagtttgacttggtggatgggggcgtcgctgcgaataaccctgcgttggtcgccatggccgaggtctcgaacgaaatccgcaacgagggttcgtgcgcttccctgaaggtgaaaccgctgcagtacaaaaagtttctggtcatttctctgggaaccggctcccagcaacacgaaatgcgatattccgcagataaggccagcacgtggggcttggtcggatggctcagctcgtccggtggcaccccgctgattgacgtcttctctcatgcgagctccgatatggttgattttcatattagtagtgtgtttcaagcccgccacgcagaacaaaactacctgcggattcaagacgataccctgacgggtgatctgggctccgtcgatgttgccacagagaagaatttgaacggtctcgtgcaggtggccgaagcgttgctgaagaagcccgttagcaaaatcaatttgcgtacgggtatccacgaaccggttgaatctaacgaaacgaatgctgaagcgttgaagcggtttgcagcacggttgtctaaccagcggcgatttcgcaaaagtcagactttcgcttag

SEQ ID NO: 137 - protein, 340 aa, Escherichia coli
MFQQQKDWETRENAFAAFTMGPLTDFWRQRDEAEFTGVDDIPVRFVRFRAQHHDRVVVICPGRIESYVKYAELAYDLFHLGFDVLIIDHRGQGRSGRLLADPHLGHVNRFNDYVDDLAAFWQQEVQPGPWRKRYILAHSMGGAISTLFLQRHPGVCDAIALTAPMFGIVIRMPSFMARQILNWAEAHPRFRDGYAIGTGRWRALPFAINVLTHSRQRYRRNLRFYADDPTIRVGGPTYHWVRESILAGEQVLAGAGDDATPTLLLQAEEERVVDNRMHDRFCELRTAAGHPVEGGRPLVIKGAYHEILFEKDAMASVALHAIVDFFNRHNSPSGNRSTEV

SEQ ID NO: 138 - protein, 400 aa, Synechococcus elongatus PCC 7942
MAATQTPSKVDDGALITVLSIDGGGIRGIIPGILLAFLESELQKLDGADARLADYFDVIAGTSTGGLVTAMLTAPNENNRPLYAAKDIKDFYLEHTPKIFPQSSSWNLIATAMKKGRSLMGPQYDGKYLHKLVREKLGNTKLEHTLTNVVIPAFDIKNLQPAIFSSFQVKKRPYLNAALSDICISTSAAPTYLPAHCFETKTSTASFKFDLVDGGVAANNPALVAMAEVSNEIRNEGSCASLKVKPLQYKKFLVISLGTGSQQHEMRYSADKASTWGLVGWLSSSGGTPLIDVFSHASSDMVDFHISSVFQARHAEQNYLRIQDDTLTGDLGSVDVATEKNLNGLVQVAEALLKKPVSKINLRTGIHEPVESNETNAEALKRFAARLSNQRRFRKSQTFA

SEQ ID NO: 139 - DNA, 552 bp, Escherichia coli
atggctgatacattgctgattttgggtgatagtttgtctgcgggttaccgcatgagcgccagcgccgcctggccagccctcctgaatgataaatggcagtccaaaacgagcgttgtcaatgcgtctattagtggcgataccagtcaacagggactggctcgcctcccggccttgctgaaacagcatcaaccgcgctgggtgctggtcgaactcggagggaatgatggtctgcgcggttttcaacctcagcaaaccgagcaaacgctccgtcaaattctgcaggacgttaaggcggcgaacgctgagcccctgctgatgcagattcgcctccccgccaattacgggcgtcgctataacgaagcgttttcggcgatttacccgaagctcgccaaagaatttgatgtcccactgctcccctttttcatggaagaagtctatctcaaaccacaatggatgcaggatgatggcattcatcccaaccgcgacgcgcaaccctttattgcggattggatggcgaaacaactccaaccactcgtgaaccacgattcgtag

SEQ ID NO: 140 - DNA, 1161 bp, Acinetobacter sp ADP1
atggcgtttagatttattgaggggattcccacaagtttgggcgtgttcggtgtggtaggttcattgtgtatgtcgcatgcacatgcaattgaagctgtacagacttctgcaacaattacgcccaccagtcctgcggcttgcattggtttggagtcgaattcagatcgtctggcttgttatgatgctctgtttaaagtagcagatacggcaaaaacaactccagttattgaacaaaaagctgctttgaacccttcgccgtcggtagagcagtctgagctcaatcctcaatctattaaggaaaaaattggtaatctttttgcgattgaaggtccaagaattgatccgaatacatccttactggataggcgctgggagctctccgaaaaatcaaaattaggtacatggaatattcgtggttataaacctgtctatttattacctattttttggacatctaaaaagaatgaatttccttcgagtccaaatcctgaaaatacagtgcatgaaaatcagaatttaacttcggctgaatccaagtttcaattatctttaaaaaccaaagcctgggaaaatatttttggcaataacggagatttatggctagggtatacccagtcttctcgttggcaggtttacaatgcagacgagtcacgtccgtttcgtgaaaccaattatgaacctgaggcaagcctaattttccgaaccaattatgagttcttgggattaaacggccgacttttgggggtaactttaaatcaccagtcaaatggtcgttctgatccattatcaagaagctggaatcgtgtcatctttaatataggattagagcgagataattttgcgctggtactcagaccatggattcgtattcaagaagaagccaagaacgacaataatcccgatatcgaggattatgtaggacgtggtgatttaactgctttttatcgctggaaagataatgatttttctttaatgctgcgtcattcattaaaagatggtgataaatcgcatggtgcggtgcagtttgattgggctttcccaatttcaggtaagcttcgtggaaattttcagttatttaatggttacggtgaaagcctgattgattataaccatcgtgcaacttatgttggtttgggcgtttcactgatgaactggtattga

SEQ ID NO: 141 - DNA, 870 bp, Escherichia coli
atgcggactctgcagggctggttgttgccggtgtttatgttgcctatggcagtatatgcacaagaggcaacggtgaaagaggtgcatgacgcgccagcggtgcgtggcagtattatcgccaatatgctgcaggagcatgacaatccgttcacgctctatccttatgacaccaactacctcatttacacccaaaccagcgatctgaataaagaagcgattgccagttacgactgggcggaaaatgcgcgtaaggatgaagtaaagtttcagttgagcctggcatttccgctgtggcgtgggattttaggcccgaactcggtgttgggtgcgtcttatacgcaaaaatcctggtggcaactgtccaatagcgaagagtcttcaccgtttcgtgaaaccaactacgaaccgcaattgttcctcggttttgccaccgattaccgttttgcaggttggacgctgcgcgatgtggagatggggtataaccacgactctaacgggcgttccgacccgacctcccgcagctggaaccgcctttatactcgcctgatggcagaaaacggtaactggctggtagaagtgaagccgtggtatgtggtgggtaatactgacgataacccggatatcaccaaatatatgggttactaccagcttaaaatcggctatcacctcggtgatgcggtgctcagtgcgaaaggacagtacaactggaacaccggctacggcggcgcggagttaggcttaagttacccgatcaccaaacatgtgcgcctttatactcaggtttacagcggctatggcgaatcgctcatcgactataacttcaaccagacccgtgtcggtgtgggggttatgctaaacgatttgttttga

SEQ ID NO: 142 - DNA, 1188 bp, Streptomyces coelicolor A3(2)
atgaccgtcgttgaaccgactcccggtgccgaccgggtcagcatccaacggctgcgtcgccgtttggaaaggctgatcggtgtcgccgccaccgaagggaacgaactcgtcgcgctgcgcaacggcgacgagatcttccccgccatgctgggggcgatccgggcggccgagcacacgatcgacatgatgacgttcgtgtactggcgcgggcagatagcccgcgacttcgccgccgctctcgccgaccgggcccggtcgggagtacgggtccggctgctgctggacggcttcggcgccaaggagatcgaacaggacctgctggacgctatggaggccgcgggagtacagatcgcctggttccgtaaaccgctgtggctgtcgccgttcaagcagaaccaccgctgccaccgcaaggccctcgtcattgacgagcacactgccttcaccggaggcgtcggcatcgccgaggagtggtgcggcgacgcccgcggccccggcgagtggcgcgacacccacgtccaggtgcgcggcccggccgtggacggcgtcgccgccgccttcgcccagaactgggccgagtgccacgacgagttgtacgacgaccgggaccggttctccgatcacacccagcccggcacatccatcgtccaggtggtgcgcggttcggccagcttcggttggcaggacatgcagaccctcatccgcgtcatgctcacctccgcggagcaccgcttccgcctggcgaccgcctacttcgccccggatacatacttcatcgacctgctctgcgccaccgcccggcgcggtgtcacggtggagatcctgctccccggcccgcatacggaccagcgggcctgccaactggccggccagtaccactacacccgtttgctggacgccggggtgtcaattcgcgagtaccagccgaccatgatgcacgccaagatcatcaccgtggacgggctggccgccctgatcgggtccaccaacttcaaccggcgctccatggaccacgacgaggagatcatgctcgccgtcctggaccaggagttcaccaacggcctggaccgggacttcgacgccgacctggaacgcagcaccgccatcgagccgacccgctggaagcgccgcgccaccctgcgacgcctccgggagacggccgtcctgcccctgcgccggttcctgtga

SEQ ID NO: 143 - DNA, 658 bp, Arabidopsis thaliana
attcgtcttctaccttcttctaactcacttcattttcaccaaaaccaacaaatatattcttctcactttccgagctttccagttcaactatggcggctccgatcatacttttctctttccttttattcttctctgtctctgtctcggcacttaacgtcggtgttcagctcatacatccctccatttccttgactaaagaatgtagccggaaatgtgaatcagagttttgttcagtgcctccatttctgaggtatgggaagtactgtggactactttacagtggatgtcctggtgagagaccttgtgatggtcttgattcttgttgcatgaaacatgatgcttgtgtccaatccaagaataatgattatctaagccaagagtgtagtcagaagttcattaactgcatgaacaatttcagccagaagaagcaaccgacgttcaaaggtaacaaatgcgacgctgatgaagtgattgatgtcatctccattgtcatggaagctgctcttatcgccggcaaagtcctcaagaaaccctaactatttatatatatttttctatatttctagttacaattgtttccctttttttccccctcaggacatttgtcttaatttatcaaaatactattaagtaatactatagcttttttttttttgtc

SEQ ID NO: 144 - DNA, 1074 bp, Arabidopsis thaliana
atggagtatcaggggcttcaaaattgggacggtcttttagacccattggacgacaatctccggcgagagattctccggtacggtcaatttgtcgaatcggcttatcaagcatttgatttcgatccttcctctccaacctacgggacatgccggtttccgaggagcacgttgttagagcgatccggtttacccaactccggttatcgactaacgaagaaccttcgtgccacgtcaggtattaacttgccacgttggattgagaaagcgccaagctggatggctacacaatctagctggattggttacgtggcagtttgccaggacaaagaagagatctcgcggcttgggcgtagagacgtcgtcatctccttccgtggaaccgccacgtgtctcgagtggttagagaaccttcgcgccacgctgactcatctccctaatgggcctactggagcaaatctaaacgggtctaactctgggcccatggttgagagcgggtttttaagcttgtatacttcaggtgttcacagtttgagagacatggtaagagaagagatcgcaaggctactccaatcttacggcgacgagccgttaagtgtaacgataaccggtcacagcctcggcgctgcgatcgcgacactagcagcttacgatatcaaaacgacgtttaaacgtgcgcctatggttaccgtaatatctttcggaggtccacgtgtcggaaacagatgctttcggaaactccttgagaagcaaggcacgaaggttctaagaatcgtgaactccgacgacgtcatcaccaaagttcctggagttgttttagaaaacagagagcaagataacgttaagatgacagcgtcgataatgccgagctggatacagagacgcgtggaggagacgccgtgggtttacgctgaaatcggtaaggagcttcggctgagtagccgtgactcgccgcacttgagcagcatcaatgtggccacgtgtcatgagctgaaaacgtatttacatttggtagacgggtttgtgagctccacgtgtccattcagagaaacagctcggagagttctccatagatga

SEQ ID NO: 145 - DNA, 1416 bp, Arabidopsis thaliana
atggcggccaaagtcttcactcagaaccctatctattctcaatctctagttagagacaaaactcctcaacagaaacacaatcttgaccatttctctatatcccagcacacctctaaaagactcgttgtctcttcttctacaatgtcccctccgatttcatcttctccactctctcttccttcttcttcttcttctcaggccattcctccttctcgagcacctgcagtgactctaccgttgtctcgggtttggagagagatacaagggagcaataactgggaaaatctcattgaacctctaagccctattctccaacaagagatcactcgctacgggaacttactctccgcttcttacaaagggtttgatctaaaccctaactccaaacgttacttgagttgcaagtatggaaaaaagaacttgcttaaagaatccggaatccatgaccctgatggctaccaagtcaccaagtatatctacgccacaccagacatcaacctcaaccctatcaagaacgagcctaaccgtgcacgttggatcggttatgtagcggtttcttctgatgaatcggtgaaacgtttgggaaggagggatattttggtgacgtttcgtggcactgtcaccaaccatgagtggttagctaacctaaagagctctttgactccggctaggcttgatcctcataaccctcgtcctgatgtcaaggtcgaatccgggttcttaggtttatacacatccggtgagagcgagagcaaattcgggctagaaagctgccgtgagcagcttctctccgagatctcgaggcttatgaacaagcacaaaggcgaggaaataagcataacacttgcgggacatagtatggggagttctctagctcagcttctagcttacgacatagcggaactcggtatgaaccagagaagggacgaaaaacctgttccggtgaccgtgttttcgtttgctggtcctagagttggtaacttggggttcaaaaaacggtgtgaggagctaggagttaaagtcttgaggatcacgaatgtaaacgatccgatcaccaaacttccaggtttcttatttaatgagaatttcagatctttaggtggtgtttacgagcttccttggagctgttcttgctacactcacgtgggagtcgaactcaccctcgatttcttcgatgttcaaaacatttcttgtgtccatgacctcgagacttacatcactctagtaaaccgtccgagatgctcgaaattggcggttaatgaagacaattttggcggcgagtttttgaacagaacaagtgaactgatgttcagtaagggacgacgtcaagcgttgcattttacaaacgcagcgaccaatgcggcatatctactttgttctatatccaaccatatgttgtattataatatattttag

SEQ ID NO: 146 - DNA, 1285 bp, Arabidopsis thaliana
aatcgccctccaagaaaaacaaaccgccatcgtgcggatcactcgtaaccatcctcagccttgatggtggtggagtcagaggaatcatcgccggagtaatccttgcctttctcgaaaaacaacttcaggaactcgatggagaagaggcgaggcttgcggattacttcgacgtgatagctggaactagcaccggtggtcttgtgacggcgatgttgactgtaccggacgagaccggtcgacctcatttcgcggctaaagacattgtgccgttttaccttgaacattgtcccaagatatttccccagcccacaggcgtgcttgctctgttaccgaagcttccaaagcttctgtctggtccaaagtacagcggaaagtatctgcgaaatcttctgagtaagcttcttggagagacaagacttcaccagaccctcacaaacattgttatacctaccttcgatatcaagaaacttcaacccactattttctcctcttaccagctgttggttgaccctagcttggatgtcaaggtatcagacatatgcatcggcacttcagctgctcccactttctttcctccccattacttttccaacgaagacagtcaaggcaataagacggagtttaatctcgttgatggcgcggttactgctaataacccgactttggtggccatgacagctgtgtctaagcagattgtgaagaataatcctgatatgggtaagctcaagccgttaggtttcgaccggtttctcgttatatcgataggaacaggatcaacaaaaagggaagagaagtacagcgcaaaaaaggctgcaaaatgggggatcatatcttggttatatgacgatggatctactccgatattagacattaccatggaatcaagccgcgacatgatccattatcacagctctgttgtgtttaaagccctacaatctgaagacaagtacctccgaatcgatgatgatacattggaaggagatgtaagcactatggatctagcgacaaagtctaacttggagaatcttcaaaagattggagagaagatgctgacaaacagagtcatgcaaatgaacatcgacactggtgtatatgaacctgttgctgaaaatattaccaatgatgaacagctaaagaggtatgcaaaaattctctcggacgaaaggaaattaaggagactaagaagcgacacaatgattaaagattcatcaaatgaatcacaagagataaaataaaaggaaatcattcgtgcttttgtgtgaaattgtttgttgcatatgtttta

SEQ ID NO: 147 - DNA, 2061 bp, Anabaena variabilis ATCC 29413
gtgataaatctagcaaatacacaaacagtcttaaaatttgatgggatagatgattatatagattttggcaaaaacgatattggtggtgtttttgctcaagggagttcatgttttacggtttcaggatggataaatcctcataaattaacagaaaaatccactagctatggaacgcggaatgtattttttgctcgttcttcagatcgatacagtgataattttgaattcggtatcagtgagacagggagtttagatatcttcattgatgaaaccattagcaagggtatcagaacttttggtaatggagaattaactataggacaatggcactttttcgccattgtttttaatagcggtcaaatcacagtatatcttgatgatcatgaatacaatgactctctgagaggttcatctttaaacaaagcaacaagctctgtaactttgggtgcaaccttacacaagcaagtctattttacaggacaattagcaaacatcagcgtctggaattatccatgtactcaggtacaaattaagacccatcattgtgggctaatagtcggggatgaaccaggattagtggcttactggaaattagatgaaggccaaggaacaacagttaaaaacaaagctggaaaatcttatcaaggaaattttcggggtaatcctagctgggatttagcgcaaattccatttgcagcaccattatccagtcaagacgatatccaggaggatgtccaatttgagataggaattattgccgaaacaagtatttcaacattaactacagatttattggcagcaacagtaccgctagttagtaacaacgaagaccaaacaatagaaattcaatatccagaaataaatagcgaaaaatcagagattattgcaaacttgatcaatctcccatcacatgaagaagcaagcaaaacagaccaaactgaagttcttgtaaatagccaacaattacaaacattcattcaggcagaatcgccagaaaccatgaatacaaaatcccgtcccagatataaaatactttccattgatggtggtggtattcggggcattattcctgcattactcttagcagaaattgaacgacggacacaagagcctatatttagtttatttgacttaattgctggtacttcaagcggcggaattttagcactgggactaactaaaccccgattaaattcatctgaagaattgcccttagctgaatacaccgctgaagaccttgtacaattatttcttgagtatggagtagaaatattttatgagccattatttgaaagactacttggcccgttagaagatatatttctccagccaaaatatccttccacaagcaaagaagaaatcttaaggcaatatttgggtaaaactcctctagtaaataatcttaaagaagtttttgtcactagttacgatatcgagcagcgaattccggtattttttacaaaccaactagaaaaacagcaaatagaatctaagaattctcataatttatgtggtaatgtatccctcttagatgccgcattagccactagtgctaccccgacttattttgctcctcatcgtatcgtcagccccgaaaatagtgcgatcgcttatactttaattgacgggggagtatttgctaataacccagcccatttagctattttagaagcgcaaattagtagtaaacgcaaagcccaaacagtccttaatcaagaagatattttagtagtttctttaggtacaggttcgccaacaagtgcttatccttataaagaagtcaagaattggggacttttacaatggggaagaccacttttaaatattgtgtttgacggtggtagcggtgtggtatctggagaattagaacagttgtttgaacctagcgataaagaagctaaaagtttttattatcgctttcaaacattgttagatgcagagttagaagcaatagataatacgaaactacaaaatactcgtcagctacaagctatagcccacaaactgatttctgaaaaaagtcaacaaatcgatgaactttgtgagcttttgttgggctaa

SEQ ID NO: 148 - DNA, 1995 bp, Saccharomyces cerevisiae S288c
atgaagttgcagagtttgttggtttctgctgcagttttgacttctctaacagagaacgttaacgcttggtcaccaaataacagttacgtccctgcgaacgtaacctgtgatgatgatattaacttagtcagagaagcatctggtttgtcagataacgaaacagaatggctgaaaaaaagagatgcatacaccaaggaggctttgcattcttttttgaatagggccacttcgaatttcagtgacacttccttgctatccactctttttggtagcaactcttccaatatgcctaagattgccgtcgcctgttctggtggtggttaccgtgccatgttgtctggtgctggtatgcttgctgctatggacaatcgtactgatggcgcaaatgagcatggtcttggtgggctgctgcaaggtgcaacttacttggcaggtctgtcgggtggtaactggttaacaagtactttggcttggaacaactggacgtctgtgcaagctatcgtggataatacaacagaatctaactcaatttgggacatctctcattcaattcttaccccagacggcattaacatctttaagactgggagtagatgggacgacatatcagatgacgttcaggataaaaaagacgccggtttcaacatctctttggcggatgtttggggccgtgctcttgcgtacaatttttggccaagcttacaccgtggtggtgtagggtacacatggtcaactttaagggaagctgatgtcttcaagaatggagaaatgcccttccctatcactgttgcagacggtagatacccaggtaccaccgtgataaacttgaatgccactcttttcgaatttaatccctttgaaatgggttcatgggaccccactttgaacgcatttacggatgtgaagtatttaggtaccaacgttacaaacggtaaaccagttaataaaggccaatgcattgccgggtttgataacactggtttcataacagccacttcatctacgttgtttaaccaatttttactaagattgaattctaccgatttaccttcatttattgctaacttagccaccgatttcctggaagatttatccgacaatagtgacgatattgcaatttacgccccaaatccattcaaggaagctaattttcttcaaaagaacgcaacctccagtattatcgaatcagaatatctatttttggttgatggtggtgaagataaccaaaatattcctttagttccattgttgcaaaaggaacgtgaactagatgttatttttgcattagacaattctgctgatactgacgactattggccagatggtgcttcattagttaacacttatcagcgtcaatttggcagccaaggtctcaatttgtctttcccatatgttccagatgtgaacacatttgtcaacttggggttgaacaaaaagccaaccttttttggttgtgatgcaagaaatttgacagacttggagtacattccaccattaattgtttacattccaaattcaagacattcatttaatggtaaccaaagtacttttaagatgtcatactccgattcagaacgtcttggtatgattaagaatgggtttgaagctgccacaatgggtaattttactgatgattctgatttcttgggctgtgttggttgcgccattatcagacgtaagcaacaaaacttgaatgctacattgccctctgaatgcagccagtgttttaccaactactgctggaacggtactattgacagcaggtcagtctcaggtgtaggaaatgatgattattcttcttctgcttccttgtctgcctccgccgctgctgcctctgcctctgcctctgcctctgcttccgcctctgcctctgcttctgggtcttccactcataagaaaaatgcgggcaatgctttggtgaattattctaacttaaacactaacacttttattggtgtcttaagtgtcattagtgccgtcttcggtctaatttag

SEQ ID NO: 149 - DNA, 2121 bp, Saccharomyces cerevisiae S288c
atgcaattacggaacatattacaggctagctcgctaatttctggactttcgctcgctgcagattcgtcgtccactactggtgatggttatgctccatcaataattccttgtcccagtgatgatacctctttagttagaaacgcgtctggcttatctaccgctgaaactgattggttaaagaaaagagatgcgtacactaaagaagctttacattccttcttaagcagagctacttctaacttcagtgacacttctttgctatccactcttttcagtagtaactcttccaatgtacccaaaattggtattgcatgctctggtggtggttatcgtgccatgttgggtggtgctggtatgattgctgctatggacaatcgtactgatggtgctaacgagcatggtcttggtggtttactacaaagttccacgtatctatcgggtttgtccggtggtaactggttgactggtactttggcatggaacaattggacctctgtacaggaaattgtagaccatatgagtgagagcgattccatctggaatatcacgaaatccattgtgaaccctggtggctctaatttgacctacacaattgaaagatgggagtccattgtacaagaagtgcaggctaagtctgatgcaggcttcaatatatctttgtcggatttgtgggcccgtgcactttcttacaacttctttccaagcttgccagatgctggctccgctttgacttggtcctctttgagagatgttgatgtgttcaaaaacggtgaaatgcctttaccaattactgttgcagatggtagatacccaggtaccaccgtgataaacttgaatgccactcttttcgagttcactccatttgaaatgggttcttgggatccttctttgaacgcttttacggatgtgaaatatctaggtaccaacgttacaaatggtaaaccggtcaacaaggatcaatgcgtttctggttacgataatgctggatttgtaattgccacatccgccagtttattcaacgaattttccctggaagcttccacttcgacctattataaaatgattaatagttttgccaacaagtacgttaacaacctatcccaagatgacgatgatattgcaatttacgctgcaaatccattcaaggatacagaatttgttgaccgcaattacacttccagtattgttgatgccgatgatttgtttttagttgatggtggtgaggacggccaaaatttgccgttggttccactaatcaagaaggaacgtgacttggatgtggtgttcgcattggatatatccgacaatactgatgaatcatggccaagtggtgtgtgcatgacgaacacttatgagcgccagtattctaagcaaggtaaaggaatggctttcccatatgttccagacgttaacaccttccttaacttgggcttaactaataagccaacgttttttggttgtgatgcaaaaaatttgacggacttggagtatattccacctttagttgtatatatcccaaacacaaaacattcattcaatggtaaccaaagtactttgaagatgaactacaatgttacagaacgtcttggaatgatcagaaatggttttgaagctgctacaatgggcaactttacggatgactctaactttttaggttgcataggttgtgccatcattagacgtaagcaagaaagcctaaatgccaccttgccccctgaatgtaccaaatgttttgcggattactgctggaacggcacactaagtacctcagctaatcctgaactatcgggaaatagtacgtatcaaagcggtgctattgcctctgcaatctctgaggctactgacggtattccaataacggctctcttaggttcatcaacctccggaaatactacatcaaactcaacaacctcgacttcatcaaatgtcacttctaactcaaactcttcgtcaaatacaactttaaactcaaattcttcatcctcttcaatttcttcctctacagctcgttcttcttcctctacggcaaacaaagcgaatgctgcggctatttcctatgcgaacactaatactctaatgagtttgttaggtgccataacagcattatttggactaatttag

SEQ ID NO: 150 - DNA, 636 bp, Acinetobacter sp. ADP1
atgcaactgtataacatgtttttagacgggaaatgggcaaaatggttcttgattggttcatttagcgtaataccttttacagtttcggcaaaaaccattcttatcttaggcgacagtctgagtgcgggttatggcattaaccccgaacagggctgggtcgctttattacaaaaacgtctggatcaacaatttcccaagcagcataaagtcattaatgccagtgtaagtggggaaaccaccagtggtgctttagctcgtttacccaaactacttactacttatcgacctaatgtggtggtcattgagcttggtggtaatgatgcattaagaggacaaccgcctcaaatgattcaaagtaatctggaaaaattaatccagcacagccaaaaggcaaaatctaaagtcgtggtgtttggaatgaaaataccaccaaattatggcactgcctatagtcaggcatttgaaaataattataaggtagtgagtcaaacatatcaggttaagttgttgccattttttcttgatggtgtggctggacacaaaagtctaatgcaaaatgaccagatccatccaaatgccaaagcccagtcaatcttgctaaataacgcatacccatatattaaaggcgctttataa

SEQ ID NO: 151 - DNA, 1029 bp, Acinetobacter sp. ADP1
atgtcagatatcccgtttctgaatccgacaatactacaacagcttgatttacctgtacctagtcgtgatcaaacccctttagtgttgcctcagttaaatctcaatcattcttttgagccttcacgtgatttattggcctatcgaaagttatatggtttagatctactggctggtgattactggcaaggctatattcagatgcccttgtttcgtttacatgtacaagtttttacgccagaaagagaaattccattaggaacggtgtgcttattacatggctatcttgaacatagtggtatttatcaaccgatcatccgtgaaatactggatcaaggttttagtgtggtcacttatgatctgcctggacatggattaagtgatggatcacccgctaatattcagaattttgatcattatcaacaggttttaatggcggtttaccagtatgttaaaaatgcagatcagttgcctaaaccttggttaggaattggtcaaagtacaggtggcgcaatctggatgcatcatttgttggaatatgcagagaaacgacaagatccgattgttgatcgggtattactattgtcaccactcatacgcccagcaaaaacggcatggtggcataattctgtgggtttaggcattattcgaagaattcgtcgtcaagttccaagacattttagacgtaataatcataatcctgagtttttacgttttatccgtcttaaagatccgttacaaccacgcatgatgggaatggactggatacttgcgatgtcaaaatggatgtttgaaatggaacagcgaccagcctgtcgtataccagtatggcttgcacaaggggcattagatcagactgtagattggcgttataacattgaatttattcgacgtaaatttcgcttacaaaccttgttgatgttagaagaaggatctcatcaactcatcaatgagcgcgctgatattcgtgctgctttgacaggacttattccagcatttttacatgctcgtccaaaacatcattattattaa

SEQ ID NO: 152 - DNA, 840 bp, Rhodococcus jostii RHA1
atgcagcatcgagaatcatccttcgccggcgtcggcggaattcccatcgtctacgacgtgtggctccccgagcggcgcccgcgcggcgtgctggttctgtgccacggcttcggcgagcatgcccggcggtacgaccatgtgatcgaacggctcggggaactcgacctcgcgatctacgcgcccgaccaccgtgggcacgggcggtcgggcggcaaacgggtccatctgaaggactggaccgagttcaccgacgacctgcaccagttgttcggcatcgcgtcgacggactggcccggcaccgaccggtttctcctcgggcacagcatgggcggttccatcgcgctgacctacgcactcgaccaccagcaggacctgaaggcactcatgctgtccgggcctgcggtcgacgtgacgagcggcacgccgcgcatcgtggtggagatcggcaagctggtgggtcgcttccttcccggagtgcccgtcgagtcgctcgacgcgaagttggtctcccgcgatcctgcggtcgtgtcggcctacgaggaggatcccctcgtccaccacgggaaggtgcctgccgggattgcgcgcgggatgatcctcgccgccgaacggttgccggaacgtctgccgtcgctgacgattcccctgcttctccagcacggccaggacgacggactcgcgagtgtgcacggcacggaactgatcgcggagtacgtcggttcggaggatctcacggtggagatctacgaaaacctgttccacgaggtgttcaacgaaccggagaacgaggaggtactcgacgacctcgtcgagtggttgcggccgcgcgtgcaggcctga

SEQ ID NO: 153 - DNA, 2546 bp, Artificial Sequence
  Codon optimized SDP1
catatggacatcagtaatgaggcaagcgttgacccctttagtattgggccgtcttcgatcatgggccgaaccatcgcttttcgagttctcttctgtcgcagcatgagtcaactgcgccgggatttgttccgctttttgctccactggtttctgcgctttaaactgacggtgagtccattcgtctcctggttccacccgcgcaatccacaaggcattctcgcggttgtcaccatcattgcctttgtcttgaaacgctatacgaatgtgaagatcaaagccgagatggcgtaccgtcggaagttttggcggaacatgatgcggacagcattgacttacgaagagtgggcccatgcagctaaaatgctggagaaggagacgccgaagatgaatgagagcgatctctatgacgaagaattggttaaaaacaaactgcaagagctgcggcatcgccgtcaagaaggatcgctgcgcgatatcatgttttgcatgcgagcggacctggtccgcaatctgggcaacatgtgtaacagtgagctgcataaagggcgactccaagtgccccgccacatcaaagaatatatcgatgaagttagtacccagctgcgcatggtttgcaattcggatagcgaggagctgagcttggaagagaaactctcgttcatgcacgaaacacgtcatgcgtttggtcgcactgctttgttgctgtccgggggtgcgtccctgggtgcattccatgtcggagtggtccgaacgctggtggagcacaagctgctgccccgaatcattgcgggctccagcgttggtagcatcatctgcgcagttgtcgcttcccggagttggccggagctgcagtcgttttttgaaaacagcctccatagtttgcagtttttcgatcagctcggaggagtgttctccatcgtgaagcgcgttatgacgcagggtgccctccatgacattcggcaattgcaatgtatgttgcgaaacctcacctcgaacctcactttccaggaggcttatgacatgacaggtcgaatcttgggaattaccgtgtgttcgcctcgcaagcacgaaccgccacgttgtctcaattacctgacctcgccccatgtcgtcatctggagtgccgtcacggcgagttgtgcgtttcctggcttgttcgaggcacaggagttgatggcgaaagaccgcagcggcgaaattgttccgtaccatcctccgtttaatctcgatccagaggtggggacgaaaagctcgagcggccggcgctggcgcgatgggagcctcgaagtcgatctgcccatgatgcagttgaaggaactctttaacgtcaatcacttcatcgtgagccaggccaatcctcatattgcacccctgctccgactcaaggatctggtgcgcgcatacggtggccgttttgccgcaaaattggctcatttggtcgagatggaagtgaaacaccggtgcaaccaggtgttggaactcggcttccccctgggcggcctcgccaaactgtttgcccaagaatgggaaggtgatgtcacggttgtcatgccggcgaccctggctcagtatagcaagatcattcaaaatccgacccatgtggaactccaaaaggccgccaatcaagggcgtcgttgcacttgggagaagctgtctgcgatcaagagtaactgcggtattgaactggccctggatgatagcgtggcgattctcaatcacatgcgccgcctgaagaagtccgccgaacgagccgccactgcgacctcgtccagccaccacggcttggcctccaccacgcgctttaatgcttcgcggcgcatccccagttggaatgtcctggcccgtgagaactctacgggttctctcgatgacctggtcactgacaacaatctccacgcgtccagtggtcgcaacctgtcggattctgaaacagagtcggtcgaactgtcgtcctggactcggacggggggcccactgatgcgcactgctagtgctaataagttcattgatttcgtgcagtctctcgatattgacatcgcattggtgcgtggtttttcgtcgagcccgaactcgcctgccgtgcctcctggcgggagcttcacacccagtccccggagcattgctgcgcattctgacattgagtctaactcgaacagcaataatctgggaacctccacatccagtattactgtgacagagggtgatctcctgcaacccgaacgtacctctaatggcttcgttctcaacgttgtgaaacgggaaaacttgggcatgcctagcattggcaaccaaaacaccgaactgccggaaagcgttcaactggacattcctgaaaaagagatggattgcagcagcgtgagcgagcatgaagaagacgacaatgataacgaggaagaacataacggaagttcgttggtcaccgtttcttcggaggacagtggtctgcaggaacccgtgtctgggtccgtgattgatgcttaggaagagcaaatcgataagctcttcgttactatccatacgatgttcccgattacgcttagagatct

SEQ ID NO: 154 - DNA, 1506 bp, Acinetobacter sp. ADP1
atgttaggcataaaaaagtcagatatgaatccttatcaagctcatcgcataaaaaaattaaaataccagcttgaaaatgccgaaagctatgaagagtggaaatctaccgcattgcaactcgatgaagaaacgggtttgcaagaatggaaatatgataactgttctgcctattttgatgctgagctgatctcataccgactcaatttattacgtaaatatcgcctgcaacagcgcgtcatggattctgtatatctgttacaggagggattaacgcatgatattgccaacattggacatccaatgctttttgcagccacttatgttggaaccaagcaaattatcgaggactatattgaggaagtatctttatcactcgcatttattgcggcaagtcaatgtcagaccttaacggtggcagagaaactcaaattctttaaaaattgtcaaaagacctatggacagccagcactcatgttttcaggtggtgctactttgggtttgtttcatagtggagtatgtaaaactctgatccagcaagatttgatgccgagagtgttatcaggctcaagtgctggtgcgattatggctggtatgcttggtacttcaactgcatcagaatttcagaaaattttattaggcgaaaacttttttagtgaggcttttcattttcgtggtgtcagagacctgcttaaaggaaatggcggttttgcggatgtgaaatatctgaaaaagtttttgattgaaaatctgggcgacttaaccttttcagaagcgtatgaaagatctggattgcatattaatgttgctgttgctccttatgatggctcgcaaaatgcaagaatcttaaatgcgtacactgcacctaatcttttggtctggagtgctgtgttggcttcatgtgcagtgcctgttttatttccgcctgtacgtctgaccagtaaaaaacgtgacggtagccatacgccttatatggccaatactaaatgggtagatggcagcgttagaagtgattttccacaggaaaaaatggcgcgtttatataatttgaattatacgattgccagtcaagtcaatccgcatgtggttccttttatgcagagcgatgcatcacgctatcgaaaggatattctgagttggccgcaacgtattttacgtcgtcaaggtaaagtgatttcattaggcatcatggattttacccgtgaacgattaggcaatgttccgccagtcagacgcttgcttgatcatggttatggcatagtggggcagaggtattatggtgacgtcaatatcattgcgccgttcaatctgcggcagtatgcatatatgctgcaaaaccctcgaccacacttatttaagttacttcaacagcagggagagcgtgccacatggccaaaaatttctgccattgaaacacatgctcggattggtaaaacgattcagcactgtatcgaggtactggattatcaaaaaaatcgatatatacaagctgaaaaagccagtgcttaa

SEQ ID NO: 155 - DNA, 1413 bp, Rhodococcus jostii RHA1
atgatcggatcgagagcacgacgacgtcgaatgctgctggtgggagcgatggtggtgggcgcacagctcgccgtcgccgcgccgtcggtcggggctcccgccgacgacggaacgccggtggacgtgcagccggctactaccgtccccgcctggcccgaggccgaccgggggttctacgaaccaccggcggacgtggtcgcggcggccgagccgggcgaaatcatcgccgcccgcgaagtgcacctggcgaacctgtcggtgcttccggtgaacgtcgacgcgtggcagctgtcgtatcgctccaccaactcgcgggacgagccgatcccggcggtcgcgacggtcgtcaagccgcggggcacgatcgacggcgtccgcaatctgctctcgctccagccggaggaagactccctcggcaagtactgcgccgcttcgtacgcactgcagcagtggtccgtgcccgcgccgctgaccggtcagatcgtcgcgccgctgcagttcctcgaggcgcaggccgccctcgcccagggatgggccgtcgtgatgccggatcaccagggcccgaacgccgcgtatgcggccgggcccctcgcgggccgcatcaccctggacgggatccgggcggcggagaacttcggcccactgggcctgacaggcaggcagactccggtcgggttgatgggctattccggaggcgcgatcgcgacgggtcacgccgccgaactccacgcgagctacgcaccggacctgaacatcgtcggtgcggccgaaggcggcatcccggccgatctcggcgccctcgtcgatctcgccgacaacaacctgggcgcgggaatcgtgctgggcggcgtgttcggcgtgagccgtgattatcccgagctcgcggagtatctcgacacacatctgaatccactcggcaagcagctcctgaccgccaagagcaacctctgcgtgagctaccagtcggcgctcctgccgttcgcgaacctgcggggcctgttcgacagcccgagcggtgacccgctgcgcgatccggtggtcgagtcggtactcgaccggacgaagatgggtcaccgggtcccggacgtcccgatgttcatgtaccaggcgaacccggactggctggtgccggtcgggcccgtcgacacactcgtcgacacctactgccaggacccggacgcccgggtgacctacacccgcgaccacgccagcgagcacctgtccctcgaaccggtcgcggcggcgagcgccctgatgtggctgcgggaccggttcgccggggtcccggccgagaccggatgcagcacccacgacgtcggatcgatggccctcgaccaggcgacgtggccggtgtggtcgtcgatcgtcggcgacacgatcacgagcctgctcggtcagccgatcggcacgtga

SEQ ID NO: 156 - DNA, 990 bp, Rhodococcus sp.
atgagcactgcgacttacgaattctgcccgtcacccctcccggtgacgcggcgggagttcgccggagccagcctgcagtcgacggccctcgcccacacactccgacgcacggtccggccgttcctggacgggtgggcgcgctaccccgaactgccgtggcccacgggagtcgtcgacctgttcgggtactcgctcggtcccatccgcggaaccgtgcgcaggcccatccggctgccgcactgccgcgccgaatggatccggccgccgggtgagctcggcgaccgggcgatcctctacctccacggcggggcgttcctgtgctgcgggatcaactcccaccgccagatggtgtcccggatctcggcggagtcgcaggcgtcgacgctgaacgtcgcgtaccggatgatcccgcggaatcccatccgggcggccgtcgaggacggtgtcgacgggtaccggtggctgctctcgcacggctacaccgcagaccggatcgtcatcgccggcgactcggcgggcgggttcctgacgttcatggtgacgctcgaagcgctgcgccaggggttgccgcgtcccgccgccgacgtcgcgctgtcgccgctgaccgacctcgatccggtgaacaagctggcccatcccaacgccgacctctgcgctgtcttccccaaacgcgcggtcggtgccctgtccaggctgatcgaaaggctggacaccaggggcgggcacgagccgtccacgtcacccgtggacggctccctcgccgccatgccgccggcgctgatccagaccggctcgcaggaaatggtctacgtcgacgcggaactgatgtccgagcggctgtcccaggcgggtgtgccgtgcgaactgcaggtgtgggaacggcaggtgcacgtcttccaggccgccgccggactgctccccgagggcacccgcgccatccgcgagatcggccggttcatccgcaaggccacacccgtgagtacttcttaa

SEQ ID NO: 157 - protein, 386 aa, Acinetobacter sp ADP1
MAFRFIEGIPTSLGVFGVVGSLCMSHAHAIEAVQTSATITPTSPAACIGLESNSDRLACYDALFKVADTAKTTPVIEQKAALNPSPSVEQSELNPQSIKEKIGNLFAIEGPRIDPNTSLLDRRWELSEKSKLGTWNIRGYKPVYLLPIFWTSKKNEFPSSPNPENTVHENQNLTSAESKFQLSLKTKAWENIFGNNGDLWLGYTQSSRWQVYNADESRPFRETNYEPEASLIFRTNYEFLGLNGRLLGVTLNHQSNGRSDPLSRSWNRVIFNIGLERDNFALVLRPWIRIQEEAKNDNNPDIEDYVGRGDLTAFYRWKDNDFSLMLRHSLKDGDKSHGAVQFDWAFPISGKLRGNFQLFNGYGESLIDYNHRATYVGLGVSLMNWY

SEQ ID NO: 158 - protein, 289 aa, Escherichia coli
MRTLQGWLLPVFMLPMAVYAQEATVKEVHDAPAVRGSIIANMLQEHDNPFTLYPYDTNYLIYTQTSDLNKEAIASYDWAENARKDEVKFQLSLAFPLWRGILGPNSVLGASYTQKSWWQLSNSEESSPFRETNYEPQLFLGFATDYRFAGWTLRDVEMGYNHDSNGRSDPTSRSWNRLYTRLMAENGNWLVEVKPWYVVGNTDDNPDITKYMGYYQLKIGYHLGDAVLSAKGQYNWNTGYGGAELGLSYPITKHVRLYTQVYSGYGESLIDYNFNQTRVGVGVMLNDLF

SEQ ID NO: 159 - protein, 395 aa, Streptomyces coelicolor A3(2)
MTVVEPTPGADRVSIQRLRRRLERLIGVAATEGNELVALRNGDEIFPAMLGAIRAAEHTIDMMTFVYWRGQIARDFAAALADRARSGVRVRLLLDGFGAKEIEQDLLDAMEAAGVQIAWFRKPLWLSPFKQNHRCHRKALVIDEHTAFTGGVGIAEEWCGDARGPGEWRDTHVQVRGPAVDGVAAAFAQNWAECHDELYDDRDRFSDHTQPGTSIVQVVRGSASFGWQDMQTLIRVMLTSAEHRFRLATAYFAPDTYFIDLLCATARRGVTVEILLPGPHTDQRACQLAGQYHYTRLLDAGVSIREYQPTMMHAKIITVDGLAALIGSTNFNRRSMDHDEEIMLAVLDQEFTNGLDRDFDADLERSTAIEPTRWKRRATLRRLRETAVLPLRRFL

SEQ ID NO: 160 - protein, 148 aa, Arabidopsis thaliana
MAAPIILFSFLLFFSVSVSALNVGVQLIHPSISLTKECSRKCESEFCSVPPFLRYGKYCGLLYSGCPGERPCDGLDSCCMKHDACVQSKNNDYLSQECSQKFINCMNNFSQKKQPTFKGNKCDADEVIDVISIVMEAALIAGKVLKKP

SEQ ID NO: 161 - protein, 357 aa, Arabidopsis thaliana
MEYQGLQNWDGLLDPLDDNLRREILRYGQFVESAYQAFDFDPSSPTYGTCRFPRSTLLERSGLPNSGYRLTKNLRATSGINLPRWIEKAPSWMATQSSWIGYVAVCQDKEEISRLGRRDVVISFRGTATCLEWLENLRATLTHLPNGPTGANLNGSNSGPMVESGFLSLYTSGVHSLRDMVREEIARLLQSYGDEPLSVTITGHSLGAAIATLAAYDIKTTFKRAPMVTVISFGGPRVGNRCFRKLLEKQGTKVLRIVNSDDVITKVPGVVLENREQDNVKMTASIMPSWIQRRVEETPWVYAEIGKELRLSSRDSPHLSSINVATCHELKTYLHLVDGFVSSTCPFRETARRVLHR

SEQ ID NO: 162 - protein, 471 aa, Arabidopsis thaliana
MAAKVFTQNPIYSQSLVRDKTPQQKHNLDHFSISQHTSKRLVVSSSTMSPPISSSPLSLPSSSSSQAIPPSRAPAVTLPLSRVWREIQGSNNWENLIEPLSPILQQEITRYGNLLSASYKGFDLNPNSKRYLSCKYGKKNLLKESGIHDPDGYQVTKYIYATPDINLNPIKNEPNRARWIGYVAVSSDESVKRLGRRDILVTFRGTVTNHEWLANLKSSLTPARLDPHNPRPDVKVESGFLGLYTSGESESKFGLESCREQLLSEISRLMNKHKGEEISITLAGHSMGSSLAQLLAYDIAELGMNQRRDEKPVPVTVFSFAGPRVGNLGFKKRCEELGVKVLRITNVNDPITKLPGFLFNENFRSLGGVYELPWSCSCYTHVGVELTLDFFDVQNISCVHDLETYITLVNRPRCSKLAVNEDNFGGEFLNRTSELMFSKGRRQALHFTNAATNAAYLLCSISNHMLYYNIF

SEQ ID NO: 163 - protein, 410 aa, Arabidopsis thaliana
SPSKKNKPPSCGSLVTILSLDGGGVRGIIAGVILAFLEKQLQELDGEEARLADYFDVIAGTSTGGLVTAMLTVPDETGRPHFAAKDIVPFYLEHCPKIFPQPTGVLALLPKLPKLLSGPKYSGKYLRNLLSKLLGETRLHQTLTNIVIPTFDIKKLQPTIFSSYQLLVDPSLDVKVSDICIGTSAAPTFFPPHYFSNEDSQGNKTEFNLVDGAVTANNPTLVAMTAVSKQIVKNNPDMGKLKPLGFDRFLVISIGTGSTKREEKYSAKKAAKWGIISWLYDDGSTPILDITMESSRDMIHYHSSVVFKALQSEDKYLRIDDDTLEGDVSTMDLATKSNLENLQKIGEKMLTNRVMQMNIDTGVYEPVAENITNDEQLKRYAKILSDERKLRRLRSDTMIKDSSNESQEIK

SEQ ID NO: 164 - protein, 686 aa, Anabaena variabilis ATCC 29413
MINLANTQTVLKFDGIDDYIDFGKNDIGGVFAQGSSCFTVSGWINPHKLTEKSTSYGTRNVFFARSSDRYSDNFEFGISETGSLDIFIDETISKGIRTFGNGELTIGQWHFFAIVFNSGQITVYLDDHEYNDSLRGSSLNKATSSVTLGATLHKQVYFTGQLANISVWNYPCTQVQIKTHHCGLIVGDEPGLVAYWKLDEGQGTTVKNKAGKSYQGNFRGNPSWDLAQIPFAAPLSSQDDIQEDVQFEIGIIAETSISTLTTDLLAATVPLVSNNEDQTIEIQYPEINSEKSEIIANLINLPSHEEASKTDQTEVLVNSQQLQTFIQAESPETMNTKSRPRYKILSIDGGGIRGIIPALLLAEIERRTQEPIFSLFDLIAGTSSGGILALGLTKPRLNSSEELPLAEYTAEDLVQLFLEYGVEIFYEPLFERLLGPLEDIFLQPKYPSTSKEEILRQYLGKTPLVNNLKEVFVTSYDIEQRIPVFFTNQLEKQQIESKNSHNLCGNVSLLDAALATSATPTYFAPHRIVSPENSAIAYTLIDGGVFANNPAHLAILEAQISSKRKAQTVLNQEDILVVSLGTGSPTSAYPYKEVKNWGLLQWGRPLLNIVFDGGSGVVSGELEQLFEPSDKEAKSFYYRFQTLLDAELEAIDNTKLQNTRQLQAIAHKLISEKSQQIDELCELLLG

SEQ ID NO: 165 - protein, 664 aa, Saccharomyces cerevisiae S288c
MKLQSLLVSAAVLTSLTENVNAWSPNNSYVPANVTCDDDINLVREASGLSDNETEWLKKRDAYTKEALHSFLNRATSNFSDTSLLSTLFGSNSSNMPKIAVACSGGGYRAMLSGAGMLAAMDNRTDGANEHGLGGLLQGATYLAGLSGGNWLTSTLAWNNWTSVQAIVDNTTESNSIWDISHSILTPDGINIFKTGSRWDDISDDVQDKKDAGFNISLADVWGRALAYNFWPSLHRGGVGYTWSTLREADVFKNGEMPFPITVADGRYPGTTVINLNATLFEFNPFEMGSWDPTLNAFTDVKYLGTNVTNGKPVNKGQCIAGFDNTGFITATSSTLFNQFLLRLNSTDLPSFIANLATDFLEDLSDNSDDIAIYAPNPFKEANFLQKNATSSIIESEYLFLVDGGEDNQNIPLVPLLQKERELDVIFALDNSADTDDYWPDGASLVNTYQRQFGSQGLNLSFPYVPDVNTFVNLGLNKKPTFFGCDARNLTDLEYIPPLIVYIPNSRHSFNGNQSTFKMSYSDSERLGMIKNGFEAATMGNFTDDSDFLGCVGCAIIRRKQQNLNATLPSECSQCFTNYCWNGTIDSRSVSGVGNDDYSSSASLSASAAAASASASASASASASASGSSTHKKNAGNALVNYSNLNTNTFIGVLSVISAVFGLI

SEQ ID NO: 166 - protein, 706 aa, Saccharomyces cerevisiae S288c
MQLRNILQASSLISGLSLAADSSSTTGDGYAPSIIPCPSDDTSLVRNASGLSTAETDWLKKRDAYTKEALHSFLSRATSNFSDTSLLSTLFSSNSSNVPKIGIACSGGGYRAMLGGAGMIAAMDNRTDGANEHGLGGLLQSSTYLSGLSGGNWLTGTLAWNNWTSVQEIVDHMSESDSIWNITKSIVNPGGSNLTYTIERWESIVQEVQAKSDAGFNISLSDLWARALSYNFFPSLPDAGSALTWSSLRDVDVFKNGEMPLPITVADGRYPGTTVINLNATLFEFTPFEMGSWDPSLNAFTDVKYLGTNVTNGKPVNKDQCVSGYDNAGFVIATSASLFNEFSLEASTSTYYKMINSFANKYVNNLSQDDDDIAIYAANPFKDTEFVDRNYTSSIVDADDLFLVDGGEDGQNLPLVPLIKKERDLDVVFALDISDNTDESWPSGVCMTNTYERQYSKQGKGMAFPYVPDVNTFLNLGLTNKPTFFGCDAKNLTDLEYIPPLVVYIPNTKHSFNGNQSTLKMNYNVTERLGMIRNGFEAATMGNFTDDSNFLGCIGCAIIRRKQESLNATLPPECTKCFADYCWNGTLSTSANPELSGNSTYQSGAIASAISEATDGIPITALLGSSTSGNTTSNSTTSTSSNVTSNSNSSSNTTLNSNSSSSSISSSTARSSSSTANKANAAAISYANTNTLMSLLGAITALFGLI

SEQ ID NO: 167 - protein, 211 aa, Acinetobacter sp. ADP1
MQLYNMFLDGKWAKWFLIGSFSVIPFTVSAKTILILGDSLSAGYGINPEQGWVALLQKRLDQQFPKQHKVINASVSGETTSGALARLPKLLTTYRPNVVVIELGGNDALRGQPPQMIQSNLEKLIQHSQKAKSKVVVFGMKIPPNYGTAYSQAFENNYKVVSQTYQVKLLPFFLDGVAGHKSLMQNDQIHPNAKAQSILLNNAYPYIKGAL

SEQ ID NO: 168 - protein, 342 aa, Acinetobacter sp. ADP1
MSDIPFLNPTILQQLDLPVPSRDQTPLVLPQLNLNHSFEPSRDLLAYRKLYGLDLLAGDYWQGYIQMPLFRLHVQVFTPEREIPLGTVCLLHGYLEHSGIYQPIIREILDQGFSVVTYDLPGHGLSDGSPANIQNFDHYQQVLMAVYQYVKNADQLPKPWLGIGQSTGGAIWMHHLLEYAEKRQDPIVDRVLLLSPLIRPAKTAWWHNSVGLGIIRRIRRQVPRHFRRNNHNPEFLRFIRLKDPLQPRMMGMDWILAMSKWMFEMEQRPACRIPVWLAQGALDQTVDWRYNIEFIRRKFRLQTLLMLEEGSHQLINERADIRAALTGLIPAFLHARPKHHYY

SEQ ID NO: 169 - protein, 279 aa, Rhodococcus jostii RHA1
MQHRESSFAGVGGIPIVYDVWLPERRPRGVLVLCHGFGEHARRYDHVIERLGELDLAIYAPDHRGHGRSGGKRVHLKDWTEFTDDLHQLFGIASTDWPGTDRFLLGHSMGGSIALTYALDHQQDLKALMLSGPAVDVTSGTPRIVVEIGKLVGRFLPGVPVESLDAKLVSRDPAVVSAYEEDPLVHHGKVPAGIARGMILAAERLPERLPSLTIPLLLQHGQDDGLASVHGTELIAEYVGSEDLTVEIYENLFHEVFNEPENEEVLDDLVEWLRPRVQA

SEQ ID NO: 170 - protein, 825 aa, Arabidopsis thaliana
MDISNEASVDPFSIGPSSIMGRTIAFRVLFCRSMSQLRRDLFRFLLHWFLRFKLTVSPFVSWFHPRNPQGILAVVTIIAFVLKRYTNVKIKAEMAYRRKFWRNMMRTALTYEEWAHAAKMLEKETPKMNESDLYDEELVKNKLQELRHRRQEGSLRDIMFCMRADLVRNLGNMCNSELHKGRLQVPRHIKEYIDEVSTQLRMVCNSDSEELSLEEKLSFMHETRHAFGRTALLLSGGASLGAFHVGVVRTLVEHKLLPRIIAGSSVGSIICAVVASRSWPELQSFFENSLHSLQFFDQLGGVFSIVKRVMTQGALHDIRQLQCMLRNLTSNLTFQEAYDMTGRILGITVCSPRKHEPPRCLNYLTSPHVVIWSAVTASCAFPGLFEAQELMAKDRSGEIVPYHPPFNLDPEVGTKSSSGRRWRDGSLEVDLPMMQLKELFNVNHFIVSQANPHIAPLLRLKDLVRAYGGRFAAKLAHLVEMEVKHRCNQVLELGFPLGGLAKLFAQEWEGDVTVVMPATLAQYSKIIQNPTHVELQKAANQGRRCTWEKLSAIKSNCGIELALDDSVAILNHMRRLKKSAERAATATSSSHHGLASTTRFNASRRIPSWNVLARENSTGSLDDLVTDNNLHASSGRNLSDSETESVELSSWTRTGGPLMRTASANKFIDFVQSLDIDIALVRGFSSSPNSPAVPPGGSFTPSPRSIAAHSDIESNSNSNNLGTSTSSITVTEGDLLQPERTSNGFVLNVVKRENLGMPSIGNQNTELPESVQLDIPEKEMDCSSVSEHEEDDNDNEEEHNGSSLVTVSSEDSGLQEPVSGSVIDA

SEQ ID NO: 171 - protein, 501 aa, Acinetobacter sp. ADP1
MLGIKKSDMNPYQAHRIKKLKYQLENAESYEEWKSTALQLDEETGLQEWKYDNCSAYFDAELISYRLNLLRKYRLQQRVMDSVYLLQEGLTHDIANIGHPMLFAATYVGTKQIIEDYIEEVSLSLAFIAASQCQTLTVAEKLKFFKNCQKTYGQPALMFSGGATLGLFHSGVCKTLIQQDLMPRVLSGSSAGAIMAGMLGTSTASEFQKILLGENFFSEAFHFRGVRDLLKGNGGFADVKYLKKFLIENLGDLTFSEAYERSGLHINVAVAPYDGSQNARILNAYTAPNLLVWSAVLASCAVPVLFPPVRLTSKKRDGSHTPYMANTKWVDGSVRSDFPQEKMARLYNLNYTIASQVNPHVVPFMQSDASRYRKDILSWPQRILRRQGKVISLGIMDFTRERLGNVPPVRRLLDHGYGIVGQRYYGDVNIIAPFNLRQYAYMLQNPRPHLFKLLQQQGERATWPKISAIETHARIGKTIQHCIEVLDYQKNRYIQAEKASA

SEQ ID NO: 172 - protein, 910 aa, Saccharomyces cerevisiae S288c
MSSKISDLTSTQNKPLLVTQQLIEKYYEQILGTSQNIIPILNPKNKFIRPSKDNSDVERVEEDAGKRLQTGKNKTTNKVNFNLDTGNEDKLDDDQETVTENENNDIEMVETDEGEDERQGSSLASKCKSFLYNVFVGNYERDILIDKVCSQKQHAMSFEEWCSAGARLDDLTGKTEWKQKLESPLYDYKLIKDLTSRMREERLNRNYAQLLYIIRTNWVRNLGNMGNVNLYRHSHVGTKYLIDEYMMESRLALESLMESDLDDSYLLGILQQTRRNIGRTALVLSGGGTFGLFHIGVLGTLFELDLLPRVISGSSAGAIVASILSVHHKEEIPVLLNHILDKEFNIFKDDKQKSESENLLIKISRFFKNGTWFDNKHLVNTMIEFLGDLTFREAYNRTGKILNITVSPASLFEQPRLLNNLTAPNVLIWSAVCASCSLPGIFPSSPLYEKDPKTGERKPWTGSSSVKFVDGSVDNDLPISRLSEMFNVDHIIACQVNIHVFPFLKLSLSCVGGEIEDEFSARLKQNLSSIYNFMANEAIHILEIGSEMGIAKNALTKLRSVLSQQYSGDITILPDMCMLFRIKELLSNPTKEFLLREITNGAKATWPKVSIIQNHCGQEFALDKAISYIKGRMIVTSSLKTPFQFADSVIGLIKAPEQTSDESKNPENSTLLTRTPTKGDNHISNVLDDNLLESESTNSLLLLRENASTYGRSPSGFRPRYSITSASLNPRHQRRKSDTISTSRRPAKSFSFSVASPTSRMLRQSSKINGHPPPILQKKTSMGRLMFPMDAKTYDPESHELIPHSASIETPAMVDKKLHFGRKSRYLRHMNKKWVSSSNILYTDSDKEDHPTLRLISNFDSDAMIHSDLAGNFRRHSIDGRPPSQATKSSPFRSRPSSSTQHKSTTSFTQ

SEQ ID NO: 173 - protein, 470 aa, Rhodococcus jostii RHA1
MIGSRARRRRMLLVGAMVVGAQLAVAAPSVGAPADDGTPVDVQPATTVPAWPEADRGFYEPPADVVAAAEPGEIIAAREVHLANLSVLPVNVDAWQLSYRSTNSRDEPIPAVATVVKPRGTIDGVRNLLSLQPEEDSLGKYCAASYALQQWSVPAPLTGQIVAPLQFLEAQAALAQGWAVVMPDHQGPNAAYAAGPLAGRITLDGIRAAENFGPLGLTGRQTPVGLMGYSGGAIATGHAAELHASYAPDLNIVGAAEGGIPADLGALVDLADNNLGAGIVLGGVFGVSRDYPELAEYLDTHLNPLGKQLLTAKSNLCVSYQSALLPFANLRGLFDSPSGDPLRDPVVESVLDRTKMGHRVPDVPMFMYQANPDWLVPVGPVDTLVDTYCQDPDARVTYTRDHASEHLSLEPVAAASALMWLRDRFAGVPAETGCSTHDVGSMALDQATWPVWSSIVGDTITSLLGQPIGT

SEQ ID NO: 174 - protein, 329 aa, Rhodococcus sp.
MSTATYEFCPSPLPVTRREFAGASLQSTALAHTLRRTVRPFLDGWARYPELPWPTGVVDLFGYSLGPIRGTVRRPIRLPHCRAEWIRPPGELGDRAILYLHGGAFLCCGINSHRQMVSRISAESQASTLNVAYRMIPRNPIRAAVEDGVDGYRWLLSHGYTADRIVIAGDSAGGFLTFMVTLEALRQGLPRPAADVALSPLTDLDPVNKLAHPNADLCAVFPKRAVGALSRLIERLDTRGGHEPSTSPVDGSLAAMPPALIQTGSQEMVYVDAELMSERLSQAGVPCELQVWERQVHVFQAAAGLLPEGTRAIREIGRFIRKATPVSTS

SEQ ID NO: 175 - DNA, 2733 bp, Saccharomyces cerevisiae S288c
atgagcagcaaaatatcagatcttacatctacacaaaataagcccctccttgttacgcaacaactaatcgaaaaatattacgaacagatcctgggcacttcccagaacataattcctattttaaatccgaagaacaagtttattaggcccagtaaggataattcagatgttgaaagggtggaggaggatgctggtaaaagactgcaaactggcaagaacaaaactacgaacaaagtaaatttcaacctggatactggaaacgaggataaacttgacgatgaccaagagacagtaacagaaaatgaaaataatgatatcgagatggttgagacagacgaaggcgaagatgaaaggcaagggtcatctttagccagtaaatgcaaatcatttctttacaacgtttttgtgggaaactatgaaagagacattcttattgacaaagtctgttcacaaaagcaacatgcgatgtcatttgaagaatggtgttctgcgggcgccagattggatgacctcactgggaaaacagaatggaagcagaaattggaaagtcccttgtatgattacaagctaataaaagatttaacatctagaatgcgtgaggagcgcttgaataggaattacgctcaattgttgtacatcattaggacgaattgggtacgaaacctgggaaatatggggaatgtaaacctatataggcactcccatgtaggcaccaaatatttaattgacgagtatatgatggagtctaggttagcgctagaatctttaatggagtctgatcttgatgatagttaccttttgggtatactgcaacaaacgagaagaaatattggtcgtaccgctttagttctcagtgggggtggaacttttggtcttttccacatcggtgtccttggtactctatttgaattggatttattacccagagtgattagtggtagcagtgctggtgcaattgtagcaagcatattatctgtccatcacaaagaagaaattccggttttactaaatcatattttggataaagaattcaacattttcaaagacgataaacagaaaagtgaaagcgagaatttgttaataaaaatatctaggttcttcaaaaacggtacgtggtttgataacaagcatctggtaaatacaatgatagaatttttgggagatttgacatttagggaagcttacaatagaacgggtaaaattttgaatataaccgtttcgccggcatctttatttgaacaaccgcgcttgctgaataatttgactgcaccaaacgtcctgatttggtccgccgtatgtgcatcatgttcactaccgggaattttcccctcgagcccactttacgaaaaagatccaaaaacgggagaaaggaaaccatggactggtagtagttcggtcaaatttgtcgatggttctgtggacaatgacttgcccatttctcgtctttctgaaatgtttaatgtagaccatattatcgcatgccaggtgaatattcacgtatttccctttttgaaactatcactatcctgtgttggcggggaaattgaggacgaatttagtgcaagattaaagcaaaacttatcaagtatatacaattttatggccaatgaagctattcatattctagaaattggaagtgagatgggaattgccaaaaacgcgcttacaaaactgagatcggtattatctcaacaatattctggtgacatcactattttgcccgacatgtgtatgctttttagaataaaggagctgttgtcaaacccaacaaaagaatttttattaagggaaatcaccaatggtgcaaaagctacgtggcccaaggtttccattattcaaaatcactgtggccaggaatttgctctggataaggcgatttcttatatcaaaggtaggatgattgtcacctcctctttaaaaacccccttccaatttgctgattcagtcattggattaattaaagctccagagcaaacgtcagatgagtccaaaaacccagaaaattcaacattgctaactaggactccaaccaagggtgacaatcatatttccaatgttttagatgacaacttattagaatcagaatcgacaaactctttgctattgttacgtgagaatgcaagcacatatgggcggtcaccttccgggtttagaccgcggtattccattacgtccgcttctctcaatccgcgtcaccaaagaaggaaatcagatactatttcaacttcaaggcgaccagccaaatccttttcattttcagttgcttctcccacatcaaggatgttgaggcaatccagcaaaatcaatggacacccaccgccaattctgcagaaaaaaacaagtatgggccggctaatgtttcctatggatgccaagacctatgacccggaaagccatgaacttatcccacattctgccagcattgaaacacctgccatggtagacaagaaattgcattttggccgaaagagtagatacttgaggcatatgaacaaaaaatgggtcagcagtagcaacatattatacacagattcggataaagaagaccatcctacattgagactgataagtaacttcgattcagacgcaatgattcatagtgatttagcgggcaatttcaggcgtcatagcattgatggaagacccccttctcaagctacaaagagctcaccgtttcgatcgaggccttcttcttcaacgcagcacaaaagcaccaccagttttactcaataa

SEQ ID NO: 176 - protein, 401 aa, Bacillus subtilis subtilis 168
MLRGTYLFGYAFFFTVGIIHISTGSLTPFLLEAFNKTTDDISVIIFFQFTGFLSGVLIAPLMIKKYSHFRTLTLALTIMLVALSIFFLTKDWYYIIVMAFLLGYGAGTLETTVGSFVIANFESNAEKMSKLEVLFGLGALSFPLLINSFIDINNWFLPYYCIFTFLFVLFVGWLIFLSKNREYAKNANQQVTFPDGGAFQYFIGDRKKSKQLGFFVFFAFLYAGIETNFANFLPSIMINQDNEQISLISVSFFWVGIIIGRILIGFVSRRLDFSKYLLFSCSCLIVLLIAFSYISNPILQLSGTFLIGLSIAGIFPIALTLASIIIQKYVDEVTSLFIASASFGGAIISFLIGWSLNQDTILLTMGIFTTMAVILVGISVKIRRTKTEDPISLENKASKTQ

SEQ ID NO: 177 - protein, 472 aa, Streptomyces coelicolor
MASTSQAPSPGAGTAHPDHLGHVIFIAAAAAMGGFLFGYDSSVINGAVEAIRDRYDVGSAVLAQVIAVALIGCAIGAATAGRIADRIGRIRCMQIAAVLFTVSAVGSALPFALWDLAMWRIIGGFAIGMASVIGPAYIAEVSPPAYRGRLGSFQQAAIVIGIAVSQLVNWGLLNAAGGDQRGELMGLEAWQVMLGVMVIPAVLYGLLSFAIPESPRFLISVGKRERAKKILEEVEGKDVDFDARVTEIEHAMHREEKSSFKDLLGGSFFFKPIVWIGIGLSVFQQFVGINVAFYYSSTLWQSVGVDPADSFFYSFTTSIINIVGTVIAMIFVDRVGRKPLALIGSVGMVIGLALEAWAFSFDLVDGKLPATQGWVALIAAHVFVLFFALSWGVVVWVFLGEMFPNRIRAAALGVAASAQWIANWAITASFPSLADWNLSGTYVIYTIFAALSIPFVLKFVKETKGKALEEMG

SEQ ID NO: 178 - protein, 472 aa, Streptomyces coelicolor A3; identical to SEQ ID NO: 177

SEQ ID NO: 179 - protein, 498 aa, Mycobacterium smegmatis  MC2 155
MNVIGITLLPRGRIMSHGPVSDDTPSIFGDDDQAASSGRTAVRIAAVAALGGLLFGYDSAVINGAVDSIQEDFGIGNYALGLAVASALLGAAAGALSAGRIADRIGRIAVMKIAAVLFFISAFGTGFAPETVTLVVFRIVGGIGVGVASVIAPAYIAETSPPGIRGRLGSLQQLAIVLGIFTSFVVNWLLQWAAGGPNEVLAMGLDAWRWMFLAMAVPAVLYGALAFTIPESPRYLVATHKIPEARRVLSMLLGQKNLEITITRIRDTLEREDKPSWRDLKKPTGGIYGIVWVGLGLSIFQQFVGINVIFYYSNVLWQAVGFSADQSAIYTVITSVVNVLTTLIAIALIDKIGRKPLLLIGSSGMAVTLATMAVIFANATVKPDGTPDLPGASGLIALIAANLFVVAFGMSWGPVVWVLLGEMFPNRFRAAALGLAAAGQWAANWLITVSFPELRNHLGLAYGFYALCAVLSFLFVSKWVEETRGKNLEDMHAEALGH

SEQ ID NO: 180 - DNA, 1647 bp, Lactococcus lactis
atgtatacagtaggagattacctattagaccgattacacgagttaggaattgaagaaatttttggagtccctggagactataacttacaatttttagatcaaattatttcccgcaaggatatgaaatgggtcggaaatgctaatgaattaaatgcttcttatatggctgatggctatgctcgtactaaaaaagctgccgcatttcttacaacctttggagtaggtgaattgagtgcagttaatggattagcaggaagttacgccgaaaatttaccagtagtagaaatagtgggatcacctacatcaaaagtccaaaatgaaggaaaatttgttcatcatacgctggctgacggtgattttaaacactttatgaaaatgcacgaacctgttacagcagctcgaactttactgacagcagaaaatgcaaccgttgaaattgaccgagtactttctgcactactaaaagaaagaaaacctgtctatatcaacttaccagttgatgttgctgctgcaaaagcagagaaaccctcactccctttgaaaaaagaaaatccaacttcaaatacaagtgaccaagagattttgaataaaattcaagaaagcttgaaaaatgccaaaaaaccaatcgtgattacaggacatgaaataattagctttggcttagaaaatacagtcactcaatttatttcaaagacaaaactccctattacgacattaaactttggaaaaagttcagttgatgaaactctcccttcatttttaggaatctataatggtaaactctcagagcctaatcttaaagaattcgtggaatcagccgacttcatcctgatgcttggagttaaactcacagactcttcaacaggagcatttacccatcatttaaatgaaaataaaatgatttcactgaacatagacgaaggaaaaatatttaacgaaagcatccaaaattttgattttgaatccctcatctcctctctcttagacctaagcggaatagaatacaaaggaaaatatatcgataaaaagcaagaagactttgttccatcaaatgcgcttttatcacaagaccgcctatggcaagcagttgaaaacctaactcaaagcaatgaaacaatcgttgctgaacaagggacatcattctttggcgcttcatcaattttcttaaaaccaaagagtcattttattggtcaacccttatggggatcaattggatatacattcccagcagcattaggaagccaaattgcagataaagaaagcagacaccttttatttattggtgatggttcacttcaacttacagtgcaagaattaggattagcaatcagagaaaaaattaatccaatttgctttattatcaataatgatggttatacagtcgaaagagaaattcatggaccaaatcaaagctacaatgatattccaatgtggaattactcaaaattaccagaatcatttggagcaacagaagaacgagtagtctcgaaaatcgttagaactgaaaatgaatttgtgtctgtcatgaaagaagctcaagcagatccaaatagaatgtactggattgagttagttttggcaaaagaagatgcaccaaaagtactgaaaaaaatgggtaaactatttgctgaacaaaataaatcataa

SEQ ID NO: 181 - protein, 548 aa, Lactococcus lactis
MYTVGDYLLDRLHELGIEEIFGVPGDYNLQFLDQIISRKDMKWVGNANELNASYMADGYARTKKAAAFLTTFGVGELSAVNGLAGSYAENLPVVEIVGSPTSKVQNEGKFVHHTLADGDFKHFMKMHEPVTAARTLLTAENATVEIDRVLSALLKERKPVYINLPVDVAAAKAEKPSLPLKKENPTSNTSDQEILNKIQESLKNAKKPIVITGHEIISFGLENTVTQFISKTKLPITTLNFGKSSVDETLPSFLGIYNGKLSEPNLKEFVESADFILMLGVKLTDSSTGAFTHHLNENKMISLNIDEGKIFNESIQNFDFESLISSLLDLSGIEYKGKYIDKKQEDFVPSNALLSQDRLWQAVENLTQSNETIVAEQGTSFFGASSIFLKPKSHFIGQPLWGSIGYTFPAALGSQIADKESRHLLFIGDGSLQLTVQELGLAIREKINPICFIINNDGYTVEREIHGPNQSYNDIPMWNYSKLPESFGATEERVVSKIVRTENEFVSVMKEAQADPNRMYWIELVLAKEDAPKVLKKMGKLFAEQNKS

SEQ ID NO: 182 - DNA, 1164 bp, Escherichia coli
atgaacaactttaatctgcacaccccaacccgcattctgtttggtaaaggcgcaatcgctggtttacgcgaacaaattcctcacgatgctcgcgtattgattacctacggcggcggcagcgtgaaaaaaaccggcgttctcgatcaagttctggatgccctgaaaggcatggacgtgctggaatttggcggtattgagccaaacccggcttatgaaacgctgatgaacgccgtgaaactggttcgcgaacagaaagtgactttcctgctggcggttggcggcggttctgtactggacggcaccaaatttatcgccgcagcggctaactatccggaaaatatcgatccgtggcacattctgcaaacgggcggtaaagagattaaaagcgccatcccgatgggctgtgtgctgacgctgccagcaaccggttcagaatccaacgcaggcgcggtgatctcccgtaaaaccacaggcgacaagcaggcgttccattctgcccatgttcagccggtatttgccgtgctcgatccggtttatacctacaccctgccgccgcgtcaggtggctaacggcgtagtggacgcctttgtacacaccgtggaacagtatgttaccaaaccggttgatgccaaaattcaggaccgtttcgcagaaggcattttgctgacgctaatcgaagatggtccgaaagccctgaaagagccagaaaactacgatgtgcgcgccaacgtcatgtgggcggcgactcaggcgctgaacggtttgattggcgctggcgtaccgcaggactgggcaacgcatatgctgggccacgaactgactgcgatgcacggtctggatcacgcgcaaacactggctatcgtcctgcctgcactgtggaatgaaaaacgcgataccaagcgcgctaagctgctgcaatatgctgaacgcgtctggaacatcactgaaggttccgatgatgagcgtattgacgccgcgattgccgcaacccgcaatttctttgagcaattaggcgtgcctacccacctctccgactacggtctggacggcagctccatcccggctttgctgaaaaaactggaagagcacggcatgacccaactgggcgaaaatcatgacattacgttggatgtcagccgccgtatatacgaagccgcccgctaa

SEQ ID NO: 183 - protein, 387 aa, Escherichia coli
MNNFNLHTPTRILFGKGAIAGLREQIPHDARVLITYGGGSVKKTGVLDQVLDALKGMDVLEFGGIEPNPAYETLMNAVKLVREQKVTFLLAVGGGSVLDGTKFIAAAANYPENIDPWHILQTGGKEIKSAIPMGCVLTLPATGSESNAGAVISRKTTGDKQAFHSAHVQPVFAVLDPVYTYTLPPRQVANGVVDAFVHTVEQYVTKPVDAKIQDRFAEGILLTLIEDGPKALKEPENYDVRANVMWAATQALNGLIGAGVPQDWATHMLGHELTAMHGLDHAQTLAIVLPALWNEKRDTKRAKLLQYAERVWNITEGSDDERIDAAIAATRNFFEQLGVPTHLSDYGLDGSSIPALLKKLEEHGMTQLGENHDITLDVSRRIYEAAR

SEQ ID NO: 184 - protein, 172 aa, Synechococcus elongatus PCC7942
MKRTLSVLVEDEAGVLTRIAGLFARRSFNIESLAVGPAEQVGISRITMVVQGDDREIEQITKQLYKLINVLKVQDISEVPCVERELMLIKVNANSSNRSEILELVQIFRARVVDVAEDSLIVEVVGDPGKMVAIVQVLQRFGIREISRTGKVALTRESGVNTEFLKALEARV

SEQ ID NO: 185 - protein, 612 aa, Synechococcus elongatus PCC7942
MQLQTVTIQQRATGAYALIDSLCQHGVKHIFGYPGGAILPIYDELHRAEAAGRVQHILVRHEQGAVHAADAYSRATGEVGVCFATSGPGATNLVTGIATAQMDSIPMVVVTGQVPRTAIGTDAFQETDIYGITLPIVKHSYVVRDPRDMARIVAEAFHIAQSGRPGPVLIDVPKDVGTEEFDYVPVAPGDIRLPGYRPTTRGNPRQIAQAIALVKVARRPLLYVGGGAITAGAHAELRAFAERFQLPVTTTLMGKGAFDERHPLALGMLGMHGTAYANFAVSECDLLIAVGARFDDRVTGKLDEFASKAQVIHVDIDPAEVGKNRVPEVPIVGDVRQVLNELLARAEEQISADDATRTQPWLDRIAYWKREYPLQIPYYADVLSPQQVIHSLGEAAPDAYFTTDVGQHQMWAAQFIKNGPRRWISSAGLGTMGFGMPAAMGAQMALPDDTVICVAGDASILMNIQELGTLAQYNIPIKVVVVNNGWQGMVRQWQEAFYDERYSNSNMERGMPDFVKLAEAFGIKGMRVSHPDELQAAIAEMLAFDGPVFLDAIVKRDENCYPMVPSGHSNAQMLGLPKDPTLDLDLAIATCSSCGAKTLPSHKFCPDCGAKL

SEQ ID NO: 186 - protein, 327 aa, Synechococcus elongatus PCC7942
MYYDADANLDLLNGKTVAIIGYGSQGHAHALNLRDSGVNVVVGLYPGSKSAAKAEAEGLKVLPVAEAAQAADWIMILLPDEFQKSVFENEIRPALSAGKVLAFAHGFNIHFAQIVPPADVDVVMIAPKSPGHLVRRTYEQGQGVPCLFAIYQDASGQARDRAMAYAKGIGGTRAGILETSFREETETDLFGEQAVLCGGLSALIKAGFETLVEAGYQPELAYFECLHEVKLIVDLIVEGGLAAMRDSISNTAEYGDYVTGPRLITEETKAEMKRVLADIQQGRFALDFVQECGAGKPVMTATRRLEAEHPIESVGKDLRAMFSWLKK

SEQ ID NO: 187 - protein, 619 aa, Synechococcus elongatus PCC7942
MPQYRSRTTTYGRNMAGARALWRATGMKDEDFEKPIIAVANSFTQFVPGHVHLKDLGQLVAREIERAGGVAKEFNTIAVDDGIAMGHGGMLYSLPSRDLIADSVEYMVNAHCADALVCISNCDKITPGMLMAALRLNIPAVFVSGGPMEAGKVILNGEERHLDLVDAMVVAADDRESDEDVATIERSACPTCGSCSGMFTANSMNCLTEALGLSLPGNGSLLATHGDRKELFLEAGRLAVKLAKQYYEQDDESVLPRSIASFKAFENAICLDIAMGGSTNTVLHLLAAAHEAGVDFTMKDIDRLSRKIPNLCKVAPSTQKYHMEDVHRAGGVIAILGELDRAGLLHREVPTVHSPSLGAALDQWDINRETATEEAKSRYLAAPGGVPTQEAFSQSKRWTALDLDRENGCIRDIEHAYSQDGGLAVLYGNLAEQGCIVKTAGVDENILVFSGPAVVCESQDEAVNWILNGRVKEGDVVLIRYEGPRGGPGMQEMLYPTSYLKSKGLGKACALITDGRFSGGTSGLSIGHVSPEAAEGGLIALVEQGDRIEIDIPNRRIHLAVSEEELAHRRAAMEARGDQAWTPKDRDRPISQALQAYAAMTTSAARGGVRDLSQILGSR

SEQ ID NO: 188 - protein, 542 aa, Synechococcus elongatus PCC7942
MTRPASAAIAVYDTTLRDGAQREGLSLSLEDKLRIAHCLDRLGVKFIEGGWPGANPKDVQFFWELQQRPLQQAEVVAFCSTRRPGQIAGEDELLKALLAAGTTWVTIFGKSWDLHVVEGLKTSLDENLVMISDSIAYLRTCDRRVIYDAEHWFDGYLANPDYALQTLAAAIEAGAEWIVLCDTNGGCLPHQISEIVAAVLDRFPSLAPDQTGPQLGIHTHNDSETAVANAIAAVQAGARMVHGTINGYGERCGNANLCSVIPNLQLKLGYDCVETEQLMQLTATSRLVSEIVNLAPDDHAAYVGQSAFAHKGGIHVSAVERNPLTYEHIRPEQVGNLRRIVISEQSGLSNVLAKARSFGLDLQRNDPACRDLLARLKELESQGYQFEAAEASFDLLMREATGDRPHFFDLKDFHVHCSKQRQELNALATVKVAVTGRDILESAEGNGPVSALDAALRKAIGSFYPAVMQFHLSDYKVRILDGAAGTSAKTRVLVESSNGSQRWSTVGVSGNIIEASYQAVVEGIEYGLLLQQQAPLQAAEKP

SEQ ID NO: 189 - protein, 540 aa, Synechococcus elongatus PCC7942
MASASSNDRILIFDTTLRDGEQSPGASLNLEEKLAIARQLARLNVDIIEAGFAFASPGDFEAVQRIAAEVGTPDGPTICSLARATRQDIKAAAEALAPAAKGRIHTFIATSDIHLEYKLKKTRAEVLAVIPEMVGYAASLVDDVEFSPEDAGRSDPEFLYECLEAAIAAGAKTINIPDTVGYTTPSEFGALIGGIKQNVCNIDQAIISVHGHNDLGLAVANFLEAVKNGARQLECTINGIGERAGNAALEELVMALHVRRQYFNPFLGRAADSEAPLTQVNTREIYKTSRLVSNLTGMLVQPNKAIVGANAFAHESGIHQDGVLKNKLTYEIVDAETIGLSTNRITLGKLSGRNAFRTRLQELGYDLGEDDLNRAFLRFKELADKKREVTDRDLEAIVNDETQQAPELFKLELVQVSAGDHARPTATVTLRTPEGEELTDAAIGTGPVDAIYRAINRVVNIPNELIEFSVKSVTAGIDAIGEVTIRLRHEDRIFSGHSANTDILVASAQAYIHALNRLAEALQKDKPLHPQEPIVAGMGR

SEQ ID NO: 190 - protein, 202 aa, Synechococcus elongatus PCC7942
MGSEILEVTGRAVPLVGNDIDTDRIIPARFLRSVTFDGLGANVFIDDRQQLQGQHPFDQAQYQGATVLVVNRNFGCGSSREHAPQAIAKWGIQAIVGESFAEIFFGNCLSLGIPCVTAGAAAVAELQAAIASDPSQPVTVDLEELQVRRGAWSAELTLAPGPLQMLRSGQWDATGQLVANAEAIAQTAANLPYVGWQAIAAS

SEQ ID NO: 191 - protein, 468 aa, Synechococcus elongatus PCC7942
MSRGTLFDKVWDLHTVATLPSGQTQLFIGLHLIHEVTSPQAFSMLRDRGLTVKFPGRTVATVDHIVPTENQARPFADSLAEEMIVTLERNCRENGIRFYNIGSGSQGIVHVIAPEQGLTQPGMTIACGDSHTSTHGAFGAIAFGIGTSQVRDVLASQTLALSKLKVRKIEVNGELQPGVYAKDVILHIIRKLGVKGGVGYAYEFAGSTFAAMSMEERMTVCNMAIEGGARCGYVNPDQITYDYLQGREFAPQGEAWDRAIAWWESLRSEADAEYDDVVVFDAAEIAPTVTWGITPGQGIGITETIPTPDSLLDEDRAVAAEAYSYMDLEPGAPLQGTKVDVCFIGSCTNGRLSDLREAAKVAQGRKVAAGIKAFVVPGSERVKQQAEAEGLDQIFTAAGFEWRQAGCSMCLAMNPDKLEGRQISASSSNRNFKGRQGSASGRTLLMSPAMVAAAAIAGEVTDVRNWLN

SEQ ID NO: 192 - protein, 365 aa, Synechococcus elongatus PCC7942
MTRSYRITLLPGDGIGPEIMAVTVDILRAIGRQFDLNFEFEEALIGGSAIDATGEPLPEATLATCRNSDAVLLAAIGGYKWDSLPRSQRPETGLLGLRAGLGLFANLRPAAILPQLVDASSLKREVIEGVDLMVVRELTGGIYFGEPKGCFADEQGRQRAFNTMVYREDEIDRIGRVAFDIARKRGKRLCSVDKANVLEVSQLWRDRMTLLGSDYADVELSHLYVDNAAMQLVRWPKQFDTIVTGNLFGDILSDIAAMLTGSIGMLPSASLGAEGPGVFEPVHGSAPDIAGQDKANPLAQVLSAAMMLRYGLDEPEAAARIEAAVNQVLDQGYRTGDLYSEGMTLVGCKGMGDALLAALESPVSA

SEQ ID NO: 193 - protein, 570 aa, Bacillus subtilis subtilis 168
MTKATKEQKSLVKNRGAELVVDCLVEQGVTHVFGIPGAKIDAVFDALQDKGPEIIVARHEQNAAFMAQAVGRLTGKPGVVLVTSGPGASNLATGLLTANTEGDPVVALAGNVIRADRLKRTHQSLDNAALFQPITKYSVEVQDVKNIPEAVTNAFRIASAGQAGAAFVSFPQDVVNEVTNTKNVRAVAAPKLGPAADDAISAAIAKIQTAKLPVVLVGMKGGRPEAIKAVRKLLKKVQLPFVETYQAAGTLSRDLEDQYFGRIGLFRNQPGDLLLEQADVVLTIGYDPIEYDPKFWNINGDRTIIHLDEIIADIDHAYQPDLELIGDIPSTINHIEHDAVKVEFAEREQKILSDLKQYMHEGEQVPADWKSDRAHPLEIVKELRNAVDDHVTVTCDIGSHAIWMSRYFRSYEPLTLMISNGMQTLGVALPWAIGASLVKPGEKVVSVSGDGGFLFSAMELETAVRLKAPIVHIVWNDSTYDMVAFQQLKKYNRTSAVDFGNIDIVKYAESFGATGLRVESPDQLADVLRQGMNAEGPVIIDVPVDYSDNINLASDKLPKEFGELMKTKAL

SEQ ID NO: 194 - protein, 491 aa, Escherichia coli K-12, MG1655
MANYFNTLNLRQQLAQLGKCRFMGRDEFADGASYLQGKKVVIVGCGAQGLNQGLNMRDSGLDISYALRKEAIAEKRASWRKATENGFKVGTYEELIPQADLVINLTPDKQHSDVVRTVQPLMKDGAALGYSHGFNIVEVGEQIRKDITVVMVAPKCPGTEVREEYKRGFGVPTLIAVHPENDPKGEGMAIAKAWAAATGGHRAGVLESSFVAEVKSDLMGEQTILCGMLQAGSLLCFDKLVEEGTDPAYAEKLIQFGWETITEALKQGGITLMMDRLSNPAKLRAYALSEQLKEIMAPLFQKHMDDIISGEFSSGMMADWANDDKKLLTWREETGKTAFETAPQYEGKIGEQEYFDKGVLMIAMVKAGVELAFETMVDSGIIEESAYYESLHELPLIANTIARKRLYEMNVVISDTAEYGNYLFSYACVPLLKPFMAELQPGDLGKAIPEGAVDNGQLRDVNEAIRSHAIEQVGKKLRGYMTDMKRIAVAG

SEQ ID NO: 195 - protein, 616 aa, Escherichia coli K-12, MG1655
MPKYRSATTTHGRNMAGARALWRATGMTDADFGKPIIAVVNSFTQFVPGHVHLRDLGKLVAEQIEAAGGVAKEFNTIAVDDGIAMGHGGMLYSLPSRELIADSVEYMVNAHCADAMVCISNCDKITPGMLMASLRLNIPVIFVSGGPMEAGKTKLSDQIIKLDLVDAMIQGADPKVSDSQSDQVERSACPTCGSCSGMFTANSMNCLTEALGLSQPGNGSLLATHADRKQLFLNAGKRIVELTKRYYEQNDESALPRNIASKAAFENAMTLDIAMGGSTNTVLHLLAAAQEAEIDFTMSDIDKLSRKVPQLCKVAPSTQKYHMEDVHRAGGVIGILGELDRAGLLNRDVKNVLGLTLPQTLEQYDVMLTQDDAVKNMFRAGPAGIRTTQAFSQDCRWDTLDDDRANGCIRSLEHAYSKDGGLAVLYGNFAENGCIVKTAGVDDSILKFTGPAKVYESQDDAVEAILGGKVVAGDVVVIRYEGPKGGPGMQEMLYPTSFLKSMGLGKACALITDGRFSGGTSGLSIGHVSPEAASGGSIGLIEDGDLIAIDIPNRGIQLQVSDAELAARREAQDARGDKAWTPKNRERQVSFALRAYASLATSADKGAVRDKSKLGG

SEQ ID NO: 196 - DNA, 627 bp, Escherichia coli
atgatgaacttcaacaatgttttccgctggcatttgcccttcctgttcctggtcctgttaaccttccgtgccgccgcagcggacacgttattgattctgggtgatagcctgagcgccgggtatcgaatgtctgccagcgcggcctggcctgccttgttgaatgataagtggcagagtaaaacgtcggtagttaatgccagcatcagcggcgacacctcgcaacaaggactggcgcgccttccggctctgctgaaacagcatcagccgcgttgggtgctggttgaactgggcggcaatgacggtttgcgtggttttcagccacagcaaaccgagcaaacgctgcgccagattttgcaggatgtcaaagccgccaacgctgaaccattgttaatgcaaatacgtctgcctgcaaactatggtcgccgttataatgaagcctttagcgccatttaccccaaactcgccaaagagtttgatgttccgctgctgcccttttttatggaagaggtctacctcaagccacaatggatgcaggatgacggtattcatcccaaccgcgacgcccagccgtttattgccgactggatggcgaagcagttgcagcctttagtaaatcatgactcataa

SEQ ID NO: 197 - DNA, 1474 bp, Cuphea hookeriana
ctggataccattttccctgcgaaaaaacatggtggctgctgcagcaagttccgcattcttccctgttccagccccgggagcctcccctaaacccgggaagttcggaaattggccctcgagcttgagcccttccttcaagcccaagtcaatccccaatggcggatttcaggttaaggcaaatgacagcgcccatccaaaggctaacggttctgcagttagtctaaagtctggcagcctcaacactcaggaggacacttcgtcgtcccctcctcctcggactttccttcaccagttgcctgattggagtaggcttctgactgcaatcacgaccgtgttcgtgaaatctaagaggcctgacatgcatgatcggaaatccaagaggcctgacatgctggtggactcgtttgggttggagagtactgttcaggatgggctcgtgttccgacagagtttttcgattaggtcttatgaaataggcactgatcgaacggcctctatagagacacttatgaaccacttgcaggaaacatctctcaatcattgtaagagtaccggtattctccttgacggcttcggtcgtactcttgagatgtgtaaaagggacctcatttgggtggtaataaaaatgcagatcaaggtgaatcgctatccagcttggggcgatactgtcgagatcaatacccggttctcccggttggggaaaatcggtatgggtcgcgattggctaataagtgattgcaacacaggagaaattcttgtaagagctacgagcgcgtatgccatgatgaatcaaaagacgagaagactctcaaaacttccatacgaggttcaccaggagatagtgcctctttttgtcgactctcctgtcattgaagacagtgatctgaaagtgcataagtttaaagtgaagactggtgattccattcaaaagggtctaactccggggtggaatgacttggatgtcaatcagcacgtaagcaacgtgaagtacattgggtggattctcgagagtatgccaacagaagttttggagacccaggagctatgctctctcgcccttgaatataggcgggaatgcggaagggacagtgtgctggagtccgtgaccgctatggatccctcaaaagttggagtccgttctcagtaccagcaccttctgcggcttgaggatgggactgctatcgtgaacggtgcaactgagtggcggccgaagaatgcaggagctaacggggcgatatcaacgggaaagacttcaaatggaaactcggtctcttagaagtgtctcggaacccttccgagatgtgcatttcttttctccttttcattttgtggtgagctgaaagaagagcatgtcgttgcaatcagtaaattgtgtagttcgtttttcgctttgcttcgctcctttgtataataatatggtcagtcgtctttgtatcatttcatgttttcagtttatttacgccatataattttt

SEQ ID NO: 198 - protein, 5 aa, Artificial Sequence
  Pah1-encoded PAP1 enzyme catalytic motif
  VARIANT (2)..(2): Xaa = Any Amino Acid
  VARIANT (4)..(4): Xaa = Any Amino Acid
DXDXT

SEQ ID NO: 199 - protein, 1406 aa, Synechococcus elongatus PCC7942-0858
MSTTQRPESTPASINNQTTEALTPKLNGADQVTSFTSVETSSLSGPANKPARTGLKLKLTLLAIAMGVLPVLGVGVTVHNLVNRSITEMTETSSSPTAQVEADQLKRSLFLTLLWGTGLSAVAVGIIAAALANRSSRRLQAAIAALEKLSQGDVNVAVAEDGDDEIAVLGQEINHAASQIQTALATAEVSREQQRSETVRVNQLVREITLRLISQANVTDVLNVAVQEARAAIGCDRVVVYKFDETWAGTIIAESVDPGWPQALQVTIDDPCFRKDWVAAYAAGRVQVTADIYDANLTECHIKQLEPIAVRANLVTPIIVERRLIGLFIAHQCSGPYQWKQLEVDLMTQLATQVGLAMTRALFLEQQVIEAERAKLVRTITTELVAQADVEGVLRTAVQETRRALEADRVIVYEFDEKWSGKIIAESGDPNWPSGLNVVIDDPCFRRDWVEAYAAGRVQATADIYNAGLTECHIQQLEPLAVKANLVAPIVVEKKLIALFIAHQCSGPRDWQQSEIDLFAQIATQVGLAMTRARFLEQQIAEANRAKLVRSITSELVAQADVKSVLRTAVQETRRAIKADRVVVYEFDENWSGKIVAESSDSNWPAALNVVIDDPCFRRDWVEAYAAGRVQATADIYNAGLTECHIQQLEPLAVKANLVAPIVVEKKLIALFIAHQCSGPRNWQQSEIDLFSQLATQVGLATTRARFLEQQVSEVNRAKLVRDITSQLVSPTNVASVLQLAVHATRRALDTDRVVVYEFDSTWAGTVTAESVNPSWPSALNVTIDDPCFRRDWVDAYAAGRIQATPDIYNAGLTECHLKQLEPLAVKANLVAPIVVEKKLIALFVAHQCSGPRNWQRSEIDLFSQLATQLGLAITRARFLEQQVTEAKRAEQIREITSRLVAQANPEDVLQTAVKETRRALATDRVVVYAFDETWSGTVIAESVEYGWPSALSITIDDPCFRRDWVDAYAAGRIQATPDIYNAGFTECHLKQLEPLAVKANLVAPIVVEKKLIALFVAHQCSGARDWQQSEIDLFSQLATQIGLALARADFLQQAETARDRAEQLAQEQQQRTEAIQAELIQLLSDVEDASRGDLTVRADISAGEISTVADIFNSLIESLRAVVVQVKASTQKVNTSLDSDANSMQRLAADSQSQAEKIKKTLNAVAEMSKSILDVSNTANQAAEVARKSSQTAISSGQTMDETVRSILHLRETVAETAKKVKRLGESSQQISKVISLINQIALQTNLLAINASIEAARAGEEGRGFAVVAEEVGQLATRSANATKEIEQIVETIQQETNEVVTAMETGTSQVVEGTQLVEATKKSLEEIVQVSQQIDQLVQAISQATVSQSQTSNVVTNLMEEMAGFSEEISDTSRHISASLQATVAVAQKLKSSVDTFRVGAEE

SEQ ID NO: 200 - DNA, 4221 bp, Synechococcus elongatus PCC7942-0858
atgtccaccacccaacgccctgaaagcacccccgcttccatcaacaatcaaacgactgaagcgctgaccccaaaactaaacggtgctgatcaggtgacgtcattcacttcggttgaaacgagttctctctctggcccagctaacaaaccagcgcgcacgggactcaagctcaagttgaccctgctagcgattgctatgggtgtcctgcctgtcctaggggtaggagtcaccgttcataacctcgtcaaccggtcaattaccgagatgaccgaaacaagcagcagtccaacagcgcaggtggaagccgaccagctcaaacgcagtcttttcctgactctgctctggggtaccggcttatcagccgtggcggtcggcataattgcagctgctttggccaaccgcagtagccgacgcttgcaagctgcgatcgcagctcttgaaaagctcagtcaaggggatgtgaatgttgccgttgccgaggatggtgacgatgagattgccgttttagggcaagaaattaaccacgctgccagtcaaattcaaacagccttagcaactgcagaggtcagtcgggagcaacaacgctcagaaacagttcgggtcaatcagctggtccgtgaaattacgctgcggctgatttctcaagccaatgtgactgacgttctgaatgtcgcagtccaagaggctcgcgctgcgatcggatgtgatcgcgtggttgtctacaagtttgatgagacttgggctggaacgatcatcgctgagtcggttgatccaggatggccccaagctctgcaggtaaccattgatgatccttgtttccgcaaagattgggtagcggcctacgcagcgggtcgggttcaggtcacagctgatatttatgatgcgaatttaactgaatgccatatcaagcaactggagccgattgcagttcgtgccaacctagttaccccgatcattgttgagagacgactgattggtctattcattgctcaccaatgctctgggccgtaccagtggaagcagttagaagttgatctcatgactcagcttgccacacaagttggcttagctatgacgcgcgcgctgttcctagagcagcaggtgattgaagcagaacgcgctaagcttgtgcgaaccatcaccacagagctggtggctcaggctgatgttgagggggtgctgagaacagctgtccaagaaactcggagggctctcgaagccgaccgcgtcatcgtttatgaattcgatgagaagtggagcggcaaaattattgcggagtctggcgaccccaattggccatcaggactcaatgttgtcattgacgacccctgttttcgtcgggactgggttgaagcctatgcggctggacgcgttcaggcgacagcagatatttataatgcaggcctaaccgaatgtcatattcagcaactggagcccttggcggtcaaagccaatctggttgcgcccattgtggtcgagaaaaaactaatcgctctgtttattgcccaccaatgctcaggcccaagagactggcagcaatctgaaattgatctgttcgcccaaatagccacacaggtcggtttggcaatgacccgcgcgcgcttcttagaacagcaaattgctgaagccaatcgggccaaacttgtgcggtcaattacatcagagttagttgctcaagctgatgttaagagcgtgctcagaacagctgttcaagagactcgccgtgcaatcaaggccgatcgcgttgtggtctatgaatttgatgagaattggagtggcaagatcgttgctgagtcgagcgactctaattggccagcggccctcaacgttgtcattgatgacccctgcttccgtagagattgggttgaagcctacgcggctggacgcgttcaggcgacagcagatatttataatgcaggcctaaccgaatgtcatattcagcaactggagcccttggcggtcaaagccaatctggttgcgcccattgtggttgagaaaaaactgattgccttattcatcgcgcatcaatgttccggcccacgcaattggcaacagtctgaaattgatctctttagtcagctcgcgacacaagttggtttggcaacgactcgggctcgtttccttgagcaacaagtgtcagaggtcaaccgtgccaaactagttcgagacatcacctcacagctcgtttctcctacaaacgttgcaagtgtcttgcaactagcggtacacgcgactcgtcgtgcactcgatactgatcgcgttgttgtctacgaatttgacagtacttgggctggtacagtaaccgctgagtcggttaacccttcttggccttctgccctcaatgtcacgattgatgacccttgcttccgacgcgattgggtggatgcctatgctgcaggtcgaattcaagcgactccagacatctacaatgcaggcctcacagaatgccatctcaaacaactggagcccttggcagtcaaagccaatctggttgccccaattgtggttgagaaaaaactaattgctttgtttgttgctcatcaatgttcagggccacgtaactggcagcgatctgagattgatctgtttagtcagctagcaacgcaactagggttggcaattacccgcgcccgtttccttgagcaacaggttacagaggcaaaacgggcagagcaaatccgcgaaattacctccagattagttgcgcaagctaatcctgaagatgtgcttcaaactgcagtgaaagagactcgccgtgcgctcgctaccgatcgcgttgtggtctatgccttcgatgaaacttggtcaggtactgtgattgcagagtcagttgaatatggctggccctcagcactgagtatcacgatcgatgacccctgcttcagacgggattgggtagatgcctatgctgcaggccgcattcaggcgactcctgatatttacaatgctggatttacggaatgccatctcaagcaattggagcctttggcagtcaaggccaatctggtggccccgattgtggttgagaaaaaactgattgccctgtttgttgctcaccaatgttcaggagcacgagattggcagcaatctgaaattgatttgtttagccaactcgccacgcaaattggcttagccttagcgcgtgcagattttctacagcaagctgaaacagcacgcgatcgcgctgagcaactggcacaagagcaacagcaacggaccgaagcgattcaagccgaactgattcaacttctcagtgatgtcgaagatgcatcacgaggtgatctcactgttcgtgctgacatctcagccggtgaaattagtacagttgctgatattttcaactctctgattgaaagtttgcgagccgtcgtagtccaagtaaaagcctccactcagaaggtgaatacttctctggatagcgatgctaactcgatgcaacgactagcagcagactcccaaagtcaggcagaaaagattaaaaagaccctaaatgctgttgctgagatgtcgaaatcaattcttgatgtctcgaacacagcaaaccaagctgctgaagttgcacgcaaatcatcgcaaacagctatcagtagtggtcaaacaatggatgagactgttcgcagtattcttcatctacgcgaaactgttgctgaaactgctaagaaggtgaagcggctcggtgaatcttctcaacagatctcaaaagtgatctcgttgattaaccaaattgctctgcaaacaaatctacttgcaattaatgccagtattgaggcggcacgagctggtgaagaaggtcgtggctttgcagtcgttgcagaagaggttggccagttagcaacacggtccgctaacgctaccaaggaaattgagcagattgttgaaacgattcagcaagaaacgaatgaggtggttacggctatggaaacaggtaccagccaagtagtcgagggaacacagctggtcgaggcgactaagaaaagccttgaagaaatcgtgcaggtttcccaacagattgaccaacttgtacaggcaatctcgcaagcaaccgtcagccagtctcagacctctaatgttgtgactaacctcatggaggagatggccggtttctcagaggaaatttcagacacctcccgtcacatttccgcttcactacaggctactgtggctgtcgctcagaaacttaaatcctccgttgacacctttagagtcggagctgaggaatag

SEQ ID NO: 201 - protein, 839 aa, Synechococcus elongatus PCC7942-1015
MTSMASEDRSLSYEQVEQEYLSGHYSEAAELAEALVQTEPQNPRLRLLRGHIFYSLGRNDQARVEYELIRGITPDPDILEQALLGMDRCDSRPHEDVSSDMEGTVIVPIGAALPVIEQVDPSALALDLPPLSGTDTIAEEPSSDRDDGDNPFATDPASPAASETEAEAPAWLADIEESAFSSTDESSPEPWAEAAEAEETAVAEPAVEEAIAPAAETLIASEPEAIPEPLSPEVDLAESQPPITADETVVEVDLAAEFAALAEPEEVASEPAASTAGLEEPGPVSFDAIADEVAKEVLGAAETAVAPQPELKASPAPVLENLPTPPNLAEAAAIARQPVTSPLRPQETKANRAAVAATPASNAPKALPTPPKQTAETRVGLIALVSALAAAAVGVVGWQASTPEARNRVVLASMASMAVAGAASAGIALQLQNRTGKRYRDLLERLNEQCQQMSNGDFETPLQVGGNDDVGMLALRFDRMRSVLGDRINRQEKRLTTLEQQREGLQNQVIRLLDDVEGVAHGDLTVQAEVTADVLGAVADSFNLTIQNLREIVAQVRDAALQVNAAATDNEQSAKNLSAEALHQAEELAAALNSVQVMTESIQRVAISASEAESVARAASQTALKGGEAVDKTLSGILRIRETVAETTRKVKKLAESSQEISKIVALISQVASRTNLLALNASIEAARAGQAGRGFAIVADEVRQLADRAAKSSKEIEQIVLKIQSETGLVMTAMEEGTQQVIQGTRLAEQARGALDEIIQVSTKIDDLVQSITADTVQQTAMSRSMAEVMQSVETTAQNTSQEAQQVAASLQGLVNIAGTLRESVDRFRLQASAAKEN

SEQ ID NO: 202 - DNA, 2520 bp, Synechococcus elongatus PCC7942-1015
atgacttcgatggcatctgaagaccgcagcctctcctacgagcaagttgaacaggagtacctcagtggccactacagtgaagcagctgagctagctgaggcactggttcagactgagccgcagaatcctcgcctgcgcttgctgcgcggtcatatcttctacagcttggggcgcaatgaccaagcacgggtcgagtacgagctgatccggggaatcacgcccgatcccgacattctcgagcaggctctgctgggaatggaccgttgtgatagccgcccccacgaggacgttagttcggatatggaaggcacggtgattgtgccgattggggcagctttgccggtgatcgaacaagtggatccgtcggccctagcactcgatttgcccccgctgagtggtacggatacgatcgcagaggaacctagctccgatcgcgatgatggcgacaatccttttgccaccgatccggctagccctgccgcctctgagaccgaggctgaggcaccagcctggttagcggacatagaagaatcagcattttcgtccacggatgaatcgagtcccgaaccttgggcagaggctgcggaagctgaagagacagcggtagcggagccagcagtagaggaagcgatcgccccagcggcagaaacgctgatcgccagtgagcctgaggcgattccagagccgctgtcgccagaagtcgatcttgctgaatcgcagccgccgatcacagcggacgagactgtcgtagaagttgatctggccgcagagttcgccgccttggctgagccagaagaggttgccagtgagccagccgcttctactgctgggctggaggaaccggggccggtcagttttgacgcgatcgctgatgaagtggccaaagaggtgctcggtgcagcagaaactgccgttgcgcctcagcccgagctgaaagccagtcctgcccccgttctcgagaacctacccacgccgcccaacctcgctgaagctgccgcgatcgctcggcaaccagtgacgtccccgctgcgcccccaagagaccaaagccaatcgggcagctgttgcggccactcctgccagcaatgcacccaaagccttaccaaccccgcccaagcaaacagcagaaacccgtgttggcttaatcgccctggtctcagccctagctgctgctgccgtaggggtggttggctggcaagcttcaacacccgaagcccgcaaccgcgttgtgctcgccagcatggccagcatggctgtggctggggctgcctctgctggtattgctctgcagctgcagaaccggacgggcaagcgctaccgcgatctgctggagcgacttaatgaacagtgccagcagatgagtaatggcgactttgaaacgcctctccaagtcggtggcaacgatgatgtcgggatgttggccctgcgcttcgatcgtatgcgcagtgtcttgggcgatcgcatcaaccgccaagagaagcgcctgaccaccctagagcagcaacgggaaggcctccaaaaccaggtgattcgtctgctggacgacgtagagggggtagcccacggtgacttgaccgttcaggctgaggtgacggccgacgttctcggggccgtggcggactcgttcaacctgacgattcagaacctacgcgagatcgtggcccaggtgcgcgatgcagcactgcaggtcaacgcagccgcaaccgacaacgaacagtccgcgaaaaacctgtcagcggaagcgctccaccaagccgaggaactcgccgctgccctcaactcagtccaggtgatgacggagtcgattcaacgggttgccatcagtgccagcgaagcggagtcggtcgcccgcgctgcttcgcaaacagctctcaagggcggtgaggcggttgacaagaccctctcagggattttgcggattcgcgaaacggtggccgaaacaacccgcaaggtgaagaagctggccgagtcttcccaagaaatttccaagatcgtggcgctgatctcgcaggtcgcttcacgaaccaacctgttggcactcaacgccagcattgaggcagctcgggccggtcaagccggacgagggtttgcgatcgttgcggatgaggttcgccagctggccgatcgcgccgcgaagtcctcgaaggagattgagcagatcgtgctcaagattcagagtgagacaggtttggtaatgactgccatggaggagggtacccagcaggtgattcaagggacgcgactggcagaacaggcccgtggtgctcttgatgaaatcattcaggtttcgaccaaaattgacgaccttgtccaatcgattacggccgacactgtgcaacagaccgccatgtctcgcagcatggccgaggtgatgcagtcggtggagaccaccgctcaaaacacctctcaagaggcgcagcaagtggctgcttccctgcagggcttggtaaatattgcagggacgttgcgagagtctgtggaccgcttccgcctacaagcatcggctgctaaggagaactga

SEQ ID NO: 203 - protein, 4 aa, Artificial Sequence
  Gly / Ser containing linker
GSGS

SEQ ID NO: 204 - protein, 4 aa, Artificial Sequence
  Gly / Ser containing linker
GGSG

SEQ ID NO: 205 - protein, 4 aa, Artificial Sequence
  Gly / Ser containing linker
GGGS

SEQ ID NO: 206 - protein, 5 aa, Artificial Sequence
  Gly / Ser containing linker
GGGGS

SEQ ID NO: 207 - protein, 4 aa, Artificial Sequence
  Gly / Asn containing linker
GNGN

SEQ ID NO: 208 - protein, 4 aa, Artificial Sequence
  Gly / Asn containing linker
GGNG

SEQ ID NO: 209 - protein, 4 aa, Artificial Sequence
  Gly / Asn containing linker
GGGN

SEQ ID NO: 210 - protein, 5 aa, Artificial Sequence
  Gly / Asn containing linker
GGGGN

SEQ ID NO: 211 - DNA, 1665 bp, Mycobacterium bovis
gtgaacccctcgacgacacaggcgcgcgtcgtcgtcgacgaactgatccgcggcggcgttcgcgacgtggtgctgtgtccgggctcgcgcaatgcgccgctggccttcgcgctgcaggacgccgaccggtccggccggatccggttgcacgttcgcatcgatgaacgcaccgccggctacctggccatcgggctggcaatcggggcgggcgcgccggtgtgtgtcgcgatgacatccggcaccgccgtggccaacctcggtccggcggtggtggaggcaaactacgctcgggtgccgctgatcgtgctgtcagccaatcggccctacgagctgctgggcaccggcgccaaccagaccatggaacagctgggctatttcggcacccaggtgcgcgccagcatcagcctggggctggccgaggacgcacccgagcggacctcggcgctcaacgcgacctggcgatcggctacgtgccgagtgttggcggccgccacgggtgctcgcaccgccaacgcgggccccgtgcacttcgacatcccgctgcgcgaaccgctggtgcccgatcccgagcccctcggcgcggtcaccccgccgggccggcctgctggcaagccgtggacctacacgccgccggtcaccttcgaccagccactggacatcgacctgtcggtcgacaccgtggtcatctccgggcatggcgctggcgtgcaccccaacctcgcggcgttgccgaccgtcgcagaaccgacggcgccgcggtccggggacaacccgttgcacccgctggcgctgccgctgctgcgccctcaacaggtgatcatgctgggccggccgacactgcatcgtccggtatcggtgctgctggccgacgcagaagtgccggtattcgcattgacaaccggtccacgctggccggatgtctcgggtaactcgcaggccaccggcacgcgggcggtcaccaccggcgcgccgcggcccgcgtggctggaccggtgtgcggcgatgaaccggcacgcgatcgcggcggttcgggaacagctcgcggcgcacccgttgaccaccgggctgcatgtcgcggcggcggtgtcgcatgcgctgcggcccggtgaccagctggtgctcggggcatccaatccggtgcgggatgtggcgttggccggtttggacacccgcggcatccgggtacggtccaaccgtggggtcgccggcatcgacggcaccgtgtccaccgcgatcggggcggccctagcttatgagggggctcacgagcgcaccggcagcccggactccccgccccgcaccatcgcactgatcggcgacctgacgttcgtgcacgacagctccgggctgttgatcgggccgaccgaaccgataccgcggtcattgaccatcgtggtgtctaatgacaacggcggcggcatcttcgaattgctcgagcagggtgatcccaggttctccgacgtgtcatcgcgaatcttcggcaccccacacgacgtcgatgtgggcgcattgtgccgcgcctaccacgtggaatctcgccagatcgaggtcgacgaactcggaccgaccctcgatcaacccggtgccggcatgcgcgtgctcgaggtcaaggccgaccggtcgtcgttgcgacaattgcacgccgccatcaaggcggctctgtga

SEQ ID NO: 212 - DNA, 1638 bp, Synechococcus sp PCC 7002
gtgaatactgcagaattattgatccgatgtctagaaaatgaaggggtggagtatatttttgggctgccgggggaagaaaatctccatatcctcgaagcccttaaggagtctcccatccgctttatcaccgtccgccatgaacagggtgccgcttttatggccgatgtgtatggtcgtttaaccgggaaagcaggggtttgtctgtctaccctggggcctggggctaccaatctaatgactggggttgccgatgcgaacctcgatggggcgcccctgattgcgattacagggcaggtgggtaccgaccgcatgcacattgaatcccaccaatatcttgatctggtggcgatgtttgcccccgtcaccaagtggaataaacaaattgtccgaccgaacacgaccccggaggtggtacgtcgtgcctttaaaattgcccagcaggaaaaaccaggggcagtacacatcgatctccctgaaaatattgcggcgatgcccgtagaaggtcagcccctccagcgggatggtcgtgaaaaaatctatgcttcaagccggagtttaaaccgggctgccgaggcgatcgcccatgccaagagtcctttaattctggtgggtaatggcattattcgcgccgatgccgccgaagccctcaccgattttgccacccagttgaatattcccgtagtcaacacctttatgggcaaaggggcaattccctacacccatcccctgtccctgtggacggtaggactccaacagcgggattttgtcacctgtgcctttgaacagagcgatttggtgattgcagtgggctacgatctgatcgaatattcccccaaacgctggaacccagagggaacgaccccaattatccacattggtgaagtggccgccgaaattgatagtagttatattcccctcacagaagttgtcggcgacattggcgatgccttaaatgaaattcgtaaacgcacagaccgtgagggcaaaaccgcgccaaaatttctcaatgtccgggctgagattcgggaggactatgaacgccacggcaccgacgctagttttccggtcaaaccccaaaaaatcatctacgatctccgccaagtgatggccccagaggacatcgtcatttctgatgtgggggcccacaaaatgtggatggcccgccattaccattgcgatcgccccaatacttgcctgatttccaatggatttgcggcgatgggcattgcgattcccggtgctgtagcagccaaattagtctacccagaaaaaaatgtcgtggctgtcacaggggacgggggatttatgatgaactgccaggagctcgaaacggccctgcgcattggggcgaactttgtcaccctaattttcaatgatggtggctatggtttgatcggttggaaacagattaaccagttcggtgcaccagcctttgtggagtttggcaatcccgattttgtgcagtttgccgaaagtatgggcctcaagggttatcggattaccgccgccgccgaccttgtgccgaccttaaaagaagccctagcccaggatgtaccagcggtgatcgattgccccgtggactacagtgagaatgtgaaattctcccaaaaatcaggggatttaatctgccgtatgtaa

SEQ ID NO: 213 - DNA, 1116 bp, Porphyromonas gingivalis
atgcaacttttcaaactcaagagtgtaacacatcactttgacacttttgcagaatttgccaaggaattctgtcttggagaacgcgacttggtaattaccaacgagttcatctatgaaccgtatatgaaggcatgccagctcccctgccattttgttatgcaggagaaatatgggcaaggcgagccttctgacgaaatgatgaataacatcttggcagacatccgtaatatccagttcgaccgcgtaatcggtatcggaggaggtacggttattgacatctctaaacttttcgttctgaaaggattaaatgatgtactcgatgcattcgaccgcaaaatacctcttatcaaagagaaagaactgatcattgtgcccacaacatgcggaacgggtagcgaggtgacgaacatttctatcgcagaaatcaaaagccgtcacaccaaaatgggattggctgacgatgccattgttgcagaccatgccatcatcatacctgaacttctgaagagcttgcctttccacttctacgcatgcagtgcaatcgatgctcttatccatgccatcgagtcatacgtatctcctaaagccagtccatattctcgtctgttcagtgaggcggcttgggacattatcctggaagtattcaagaaaatcgccgaacacggccctgaataccgcttcgaaaagctgggagaaatgatcatggccagcaactatgccggtatagccttcggaaatgcaggagtaggagccgtccacgcactatcctacccgttgggaggcaactatcacgtgccgcatggagaagcaaactatcagttcttcacagaggtattcaaagtataccaaaagaagaatcctttcggctatatagtcgaactcaactggaagctctccaagatactgaactgccagcccgaatacgtatatccgaagctggatgaacttctcggatgccttcttaccaagaaacctttgcacgaatacggcatgaaggacgaagaggtaagaggctttgcggaatcagtgcttaagacacagcaaagattgctcgccaacaactacgtagagcttactgtagatgagatcgaaggtatctacagaagactctactaa

SEQ ID NO: 214 - DNA, 1116 bp, Clostridium kluyveri
atgaagttattaaaattggcacctgatgtttataaatttgatactgcagaggagtttatgaaatactttaaggttggaaaaggtgactttatacttactaatgaatttttatataaacctttccttgagaaattcaatgatggtgcagatgctgtatttcaggagaaatatggactcggtgaaccttctgatgaaatgataaacaatataattaaggatattggagataaacaatataatagaattattgctgtagggggaggatctgtaatagatatagccaaaatcctcagtcttaagtatactgatgattcattggatttgtttgagggaaaagtacctcttgtaaaaaacaaagaattaattatagttccaactacatgtggaacaggttcagaagttacaaatgtatcagttgcagaattaaagagaagacatactaaaaaaggaattgcttcagacgaattatatgcaacttatgcagtacttgtaccagaatttataaaaggacttccatataagttttttgtaaccagctccgtagatgccttaatacatgcaacagaagcttatgtatctccaaatgcaaatccttatactgatatgtttagtgtaaaagctatggagttaattttaaatggatacatgcaaatggtagagaaaggaaatgattacagagttgaaataattgaggattttgttataggcagcaattatgcaggtatagcttttggaaatgcaggagtgggagcggttcacgcactctcatatccaataggcggaaattatcatgtgcctcatggagaagcaaattatctgttttttacagaaatatttaaaacttattatgagaaaaatccaaatggcaagattaaagatgtaaataaactattagcaggcatactaaaatgtgatgaaagtgaagcttatgacagtttatcacaacttttagataaattattgtcaagaaaaccattaagagaatatggaatgaaagaggaagaaattgaaacttttgctgattcagtaatagaaggacagcagagactgttggtaaacaattatgaacctttttcaagagaagacatagtaaacacatataaaaagttatattaa

SEQ ID NO: 215 - DNA, 1290 bp, Clostridium kluyveri
atggagtgggaagagatatataaagagaaactggtaactgcagaaaaagctgtttcaaaaatagaaaaccatagcagggtagtttttgcacatgcagtaggagaacccgtagatttagtaaatgcactagttaaaaataaggataattatataggactagaaatagttcacatggtagctatgggcaaaggtgaatatacaaaagagggtatgcaaagacattttagacataatgctttatttgtaggcggatgtactagagatgcagtaaattcaggaagagcagattatacaccttgttttttctatgaagtgccaagtttgtttaaagaaaaacgtttgcctgtagatgtagcacttattcaggtaagtgagccagataaatatggctactgcagttttggagtttccaatgactataccaagccagcagcagaaagtgctaagcttgtaattgcagaagtgaataaaaacatgccaagaactcttggagattcttttatacatgtatcagatattgattatatagtggaagcttcacacccattgttagaattgcagcctcctaaattgggagatgtagaaaaagccataggagaaaactgtgcatctttaattgaagatggagctactcttcagcttggaataggtgctataccagatgcggtacttttattcttaaagaacaaaaagaatttaggaatacattctgagatgatatcagatggtgtgatggaactggtgaaggcaggggttatcaataacaagaaaaagaccctccatccaggcaaaatagttgtaacatttttaatgggaacaaaaaaattatatgattttgtaaacaataatccaatggtagaaacttattctgtagattatgtaaataatccactggtaattatgaaaaatgacaatatggtttcaataaattcttgtgttcaagtagacttaatgggacaagtatgttctgaaagtataggattgaaacagataagtggagtgggaggccaggtagattttattagaggagctaatctatcaaagggtggaaaggctattatagctataccttccacagctggaaaaggaaaagtttcaagaataactccacttctagatactggtgctgcagttacaacttctagaaatgaagtagattatgtagttactgaatatggtgttgctcatcttaagggcaaaactttaagaaatagggcaagagctctaataaatatcgctcatccaaaattcagagaatcattaatgaatgaatttaaaaagagattttag

SEQ ID NO: 216 - DNA, 2577 bp, Clostridium acetobutylicum
atgaaagttacaaatcaaaaagaactaaaacaaaagctaaatgaattgagagaagcgcaaaagaagtttgcaacctatactcaagagcaagttgataaaatttttaaacaatgtgccatagccgcagctaaagaaagaataaacttagctaaattagcagtagaagaaacaggaataggtcttgtagaagataaaattataaaaaatcattttgcagcagaatatatatacaataaatataaaaatgaaaaaacttgtggcataatagaccatgacgattctttaggcataacaaaggttgctgaaccaattggaattgttgcagccatagttcctactactaatccaacttccacagcaattttcaaatcattaatttctttaaaaacaagaaacgcaatattcttttcaccacatccacgtgcaaaaaaatctacaattgctgcagcaaaattaattttagatgcagctgttaaagcaggagcacctaaaaatataataggctggatagatgagccatcaatagaactttctcaagatttgatgagtgaagctgatataatattagcaacaggaggtccttcaatggttaaagcggcctattcatctggaaaacctgcaattggtgttggagcaggaaatacaccagcaataatagatgagagtgcagatatagatatggcagtaagctccataattttatcaaagacttatgacaatggagtaatatgcgcttctgaacaatcaatattagttatgaattcaatatacgaaaaagttaaagaggaatttgtaaaacgaggatcatatatactcaatcaaaatgaaatagctaaaataaaagaaactatgtttaaaaatggagctattaatgctgacatagttggaaaatctgcttatataattgctaaaatggcaggaattgaagttcctcaaactacaaagatacttataggcgaagtacaatctgttgaaaaaagcgagctgttctcacatgaaaaactatcaccagtacttgcaatgtataaagttaaggattttgatgaagctctaaaaaaggcacaaaggctaatagaattaggtggaagtggacacacgtcatctttatatatagattcacaaaacaataaggataaagttaaagaatttggattagcaatgaaaacttcaaggacatttattaacatgccttcttcacagggagcaagcggagatttatacaattttgcgatagcaccatcatttactcttggatgcggcacttggggaggaaactctgtatcgcaaaatgtagagcctaaacatttattaaatattaaaagtgttgctgaaagaagggaaaatatgctttggtttaaagtgccacaaaaaatatattttaaatatggatgtcttagatttgcattaaaagaattaaaagatatgaataagaaaagagcctttatagtaacagataaagatctttttaaacttggatatgttaataaaataacaaaggtactagatgagatagatattaaatacagtatatttacagatattaaatctgatccaactattgattcagtaaaaaaaggtgctaaagaaatgcttaactttgaacctgatactataatctctattggtggtggatcgccaatggatgcagcaaaggttatgcacttgttatatgaatatccagaagcagaaattgaaaatctagctataaactttatggatataagaaagagaatatgcaatttccctaaattaggtacaaaggcgatttcagtagctattcctacaactgctggtaccggttcagaggcaacaccttttgcagttataactaatgatgaaacaggaatgaaataccctttaacttcttatgaattgaccccaaacatggcaataatagatactgaattaatgttaaatatgcctagaaaattaacagcagcaactggaatagatgcattagttcatgctatagaagcatatgtttcggttatggctacggattatactgatgaattagccttaagagcaataaaaatgatatttaaatatttgcctagagcctataaaaatgggactaacgacattgaagcaagagaaaaaatggcacatgcctctaatattgcggggatggcatttgcaaatgctttcttaggtgtatgccattcaatggctcataaacttggggcaatgcatcacgttccacatggaattgcttgtgctgtattaatagaagaagttattaaatataacgctacagactgtccaacaaagcaaacagcattccctcaatataaatctcctaatgctaagagaaaatatgctgaaattgcagagtatttgaatttaaagggtactagcgataccgaaaaggtaacagccttaatagaagctatttcaaagttaaagatagatttgagtattccacaaaatataagtgccgctggaataaataaaaaagatttttataatacgctagataaaatgtcagagcttgcttttgatgaccaatgtacaacagctaatcctaggtatccacttataagtgaacttaaggatatctatataaaatcattttaa

SEQ ID NO: 217 - DNA, 2676 bp, Escherichia coli
atggctgttactaatgtcgctgaacttaacgcactcgtagagcgtgtaaaaaaagcccagcgtgaatatgccagtttcactcaagagcaagtagacaaaatcttccgcgccgccgctctggctgctgcagatgctcgaatcccactcgcgaaaatggccgttgccgaatccggcatgggtatcgtcgaagataaagtgatcaaaaaccactttgcttctgaatatatctacaacgcctataaagatgaaaaaacctgtggtgttctgtctgaagacgacacttttggtaccatcactatcgctgaaccaatcggtattatttgcggtatcgttccgaccactaacccgacttcaactgctatcttcaaatcgctgatcagtctgaagacccgtaacgccattatcttctccccgcacccgcgtgcaaaagatgccaccaacaaagcggctgatatcgttctgcaggctgctatcgctgccggtgctccgaaagatctgatcggctggatcgatcaaccttctgttgaactgtctaacgcactgatgcaccacccagacatcaacctgatcctcgcgactggtggtccgggcatggttaaagccgcatacagctccggtaaaccagctatcggtgtaggcgcgggcaacactccagttgttatcgatgaaactgctgatatcaaacgtgcagttgcatctgtactgatgtccaaaaccttcgacaacggcgtaatctgtgcttctgaacagtctgttgttgttgttgactctgtttatgacgctgtacgtgaacgttttgcaacccacggcggctatctgttgcagggtaaagagctgaaagctgttcaggatgttatcctgaaaaacggtgcgctgaacgcggctatcgttggtcagccagcctataaaattgctgaactggcaggcttctctgtaccagaaaacaccaagattctgatcggtgaagtgaccgttgttgatgaaagcgaaccgttcgcacatgaaaaactgtccccgactctggcaatgtaccgcgctaaagatttcgaagacgcggtagaaaaagcagagaaactggttgctatgggcggtatcggtcatacctcttgcctgtacactgaccaggataaccaaccggctcgcgtttcttacttcggtcagaaaatgaaaacggcgcgtatcctgattaacaccccagcgtctcagggtggtatcggtgacctgtataacttcaaactcgcaccttccctgactctgggttgtggttcttggggtggtaactccatctctgaaaacgttggtccgaaacacctgatcaacaagaaaaccgttgctaagcgagctgaaaacatgttgtggcacaaacttccgaaatctatctacttccgccgtggctccctgccaatcgcgctggatgaagtgattactgatggccacaaacgtgcgctcatcgtgactgaccgcttcctgttcaacaatggttatgctgatcagatcacttccgtactgaaagcagcaggcgttgaaactgaagtcttcttcgaagtagaagcggacccgaccctgagcatcgttcgtaaaggtgcagaactggcaaactccttcaaaccagacgtgattatcgcgctgggtggtggttccccgatggacgccgcgaagatcatgtgggttatgtacgaacatccggaaactcacttcgaagagctggcgctgcgctttatggatatccgtaaacgtatctacaagttcccgaaaatgggcgtgaaagcgaaaatgatcgctgtcaccaccacttctggtacaggttctgaagtcactccgtttgcggttgtaactgacgacgctactggtcagaaatatccgctggcagactatgcgctgactccggatatggcgattgtcgacgccaacctggttatggacatgccgaagtccctgtgtgctttcggtggtctggacgcagtaactcacgccatggaagcttatgtttctgtactggcatctgagttctctgatggtcaggctctgcaggcactgaaactgctgaaagaatatctgccagcgtcctaccacgaagggtctaaaaatccggtagcgcgtgaacgtgttcacagtgcagcgactatcgcgggtatcgcgtttgcgaacgccttcctgggtgtatgtcactcaatggcgcacaaactgggttcccagttccatattccgcacggtctggcaaacgccctgctgatttgtaacgttattcgctacaatgcgaacgacaacccgaccaagcagactgcattcagccagtatgaccgtccgcaggctcgccgtcgttatgctgaaattgccgaccacttgggtctgagcgcaccgggcgaccgtactgctgctaagatcgagaaactgctggcatggctggaaacgctgaaagctgaactgggtattccgaaatctatccgtgaagctggcgttcaggaagcagacttcctggcgaacgtggataaactgtctgaagatgcattcgatgaccagtgcaccggcgctaacccgcgttacccgctgatctccgagctgaaacagattctgctggatacctactacggtcgtgattatgtagaaggtgaaactgcagcgaagaaagaagctgctccggctaaagctgagaaaaaagcgaaaaaatccgcttaa

SEQ ID NO: 218 - DNA, 1167 bp, Escherichia coli
atgaacttacatgaatatcaggcaaaacaactttttgcccgctatggcttaccagcaccggtgggttatgcctgtactactccgcgcgaagcagaagaagccgcttcaaaaatcggtgccggtccgtgggtagtgaaatgtcaggttcacgctggtggccgcggtaaagcgggcggtgtgaaagttgtaaacagcaaagaagacatccgtgcttttgcagaaaactggctgggcaagcgtctggtaacgtatcaaacagatgccaatggccaaccggttaaccagattctggttgaagcagcgaccgatatcgctaaagagctgtatctcggtgccgttgttgaccgtagttcccgtcgtgtggtctttatggcctccaccgaaggcggcgtggaaatcgaaaaagtggcggaagaaactccgcacctgatccataaagttgcgcttgatccgctgactggcccgatgccgtatcagggacgcgagctggcgttcaaactgggtctggaaggtaaactggttcagcagttcaccaaaatcttcatgggcctggcgaccattttcctggagcgcgacctggcgttgatcgaaatcaacccgctggtcatcaccaaacagggcgatctgatttgcctcgacggcaaactgggcgctgacggcaacgcactgttccgccagcctgatctgcgcgaaatgcgtgaccagtcgcaggaagatccgcgtgaagcacaggctgcacagtgggaactgaactacgttgcgctggacggtaacatcggttgtatggttaacggcgcaggtctggcgatgggtacgatggacatcgttaaactgcacggcggcgaaccggctaacttccttgacgttggcggcggcgcaaccaaagaacgtgtaaccgaagcgttcaaaatcatcctctctgacgacaaagtgaaagccgttctggttaacatcttcggcggtatcgttcgttgcgacctgatcgctgacggtatcatcggcgcggtagcagaagtgggtgttaacgtaccggtcgtggtacgtctggaaggtaacaacgccgaactcggcgcgaagaaactggctgacagcggcctgaatattattgcagcaaaaggtctgacggatgcagctcagcaggttgttgccgcagtggaggggaaataa

SEQ ID NO: 219 - DNA, 870 bp, Escherichia coli
atgtccattttaatcgataaaaacaccaaggttatctgccagggctttaccggtagccaggggactttccactcagaacaggccattgcatacggcactaaaatggttggcggcgtaaccccaggtaaaggcggcaccacccacctcggcctgccggtgttcaacaccgtgcgtgaagccgttgctgccactggcgctaccgcttctgttatctacgtaccagcaccgttctgcaaagactccattctggaagccatcgacgcaggcatcaaactgattatcaccatcactgaaggcatcccgacgctggatatgctgaccgtgaaagtgaagctggatgaagcaggcgttcgtatgatcggcccgaactgcccaggcgttatcactccgggtgaatgcaaaatcggtatccagcctggtcacattcacaaaccgggtaaagtgggtatcgtttcccgttccggtacactgacctatgaagcggttaaacagaccacggattacggtttcggtcagtcgacctgtgtcggtatcggcggtgacccgatcccgggctctaactttatcgacattctcgaaatgttcgaaaaagatccgcagaccgaagcgatcgtgatgatcggtgagatcggcggtagcgctgaagaagaagcagctgcgtacatcaaagagcacgttaccaagccagttgtgggttacatcgctggtgtgactgcgccgaaaggcaaacgtatgggccacgcgggtgccatcattgccggtgggaaagggactgcggatgagaaattcgctgctctggaagccgcaggcgtgaaaaccgttcgcagcctggcggatatcggtgaagcactgaaaactgttctgaaataa

SEQ ID NO: 220 - DNA, 1356 bp, Porphyromonas gingivalis
atggaaatcaaagaaatggtgagccttgcgcgcaaggctcagaaggagtatcaagctactcataaccaagaagcagttgacaacatttgccgagctgcagcgaaagttatttatgaaaatgcagctattctggctcgcgaagcagtagacgaaaccggcatgggcgtttacgaacacaaagtggccaagaatcaaggcaaatccaaaggtgtttggtacaacctccacaataaaaaatcggttggtatcctcaatatagacgagcgtaccggtatgatcgagatcgcaaagcctatcggagttgtaggagccgtaacgccgacgaccaacccgatcgttactccgatgagcaatatcatctttgctcttaagacttgcaatgccatcattattgccccccaccccagatctaaaaaatgctctgcacacgcagttcgtctgatcaaagaagctatcgctccgttcaacgtaccggaaggtatggttcagatcatcgaagaacccagcatcgagaagacgcaggaactcatgggcgccgtagacgtagtagttgctacgggaggtatgggcatggtgaagtctgcatattcttcaggaaagccttctttcggtgttggagccggtaacgttcaggtgatcgtggatagcaacatcgatttcgaagccgctgcagaaaaaatcatcaccggtcgtgctttcgacaacggtatcatctgctcaggcgaacagagcatcatctacaacgaggctgacaaggaagcagttttcacagcattccgcaaccacggtgcatatttctgtgacgaagccgaaggagatcgggctcgtgcggctatcttcgaaaatggagccatcgcgaaagatgtagtaggtcagagtgttgccttcattgccaagaaagcaaacatcaatatccccgagggtacccgtattctcgttgttgaagctcgcggcgtaggagcagaagacgttatctgtaaggaaaagatgtgtcccgtaatgtgcgccctcagctacaagcacttcgaagaaggtgtagaaatcgcacgtacgaacctcgccaacgaaggtaacggccacacctgtgctatccactccaacaatcaggcacacatcatcctcgcaggatcagagctgacggtatctcgtatcgtagtgaatgctccgagtgctactacagcaggcggtcacatccaaaacggtcttgccgtaaccaatacgctcggatgcggatcatggggtaataactctatctccgagaacttcacttacaagcacctcctcaacatttcacgcatcgcaccgctgaattcaagcattcacatccccaatgacaaagaaatctgggaactctaa

SEQ ID NO: 221 - DNA, 1944 bp, Synechococcus elongatus PCC7942
atggcggctgaacaaacggcgatcgcacccttggcggtagctgttgagtcgcagcagtggcgcattgaagacagcgaagcgctctatcggattcagggctggggtgagccttactttggtatcaatgctgccggtcacattaccgtttcaccccaaggcgatcgcggcggctccctcgacctttatgaactcgtagaagcgctgcggcggcggggcctgaatctgcccttgctgatccgctttcccgatattttggaagaccggatcgagcggttgaatgcttgctttgccaaagcgatcgctcgttataactatgccggtgagtatcggggcgttttccccgtcaagtgcaaccagcagcgccatttgatcgaaagtttggtcaactatgggcgtccttttcaatttgggctagaagcgggttcaaagccggaactattaattgccctggcgcacttggatacgccgggggcgttgctgatctgcaacggctataaagatcgggactatatcgaaacggcgattctgggacggcgcttgggcaaaacgcccatccttgtgattgagcaactggaagaagtggacgttgcgatcgccgccagccagcgcttggggatcgaacccattttaggtgtgcgtgccaagctcaacgccagaggaatggggcgctggggcagttcggcaggcgatcgcgccaagtttggtctgaccatgcccgagattgtggcggcagtcgagaaacttcaggcagcgaacctgctgcactgtctgcaactgctgcacttccatatcggctcgcaaatttctgatatcagcgtgctcaaggatgcgatccaagaagcagcgcagatctatgtgcaactggccgccttgggcgcagacatgcgttatctcgatgttggtggtggtttgggggtcgattacgacggttcgaagaccaacttccacgcctcgaaaaactacaacatgcagacctacgccaacgatgtggttgccacgattaaggatgcttgtcaggcacaccggctggctgtcccgaccttaacgagtgagagtgggcgcgcgatcgcctctcaccaatcggtgttggtatttgatgtgttgggcagtagcgaggtgcctcgggctgccgtggaaccacctcaggaagaggattctgcgatcgtccgcaccctttacgaagtcttggaagcgatcgcccttgagaatctgcaggagtgctatcacgatgccttcaaactcaaggaagatgcggtttctgccttccgcttgggctatttgagtttgacagagcgcgccaaagcagagcgactcttttggagctgctgccatcggattcaggagttcttgaagcaactcgaccgcattcctgaagatctcgaagatctagaacgggtgatggcgtcgatttattacgtcaacctctccgtcttccaatcagctcccgatacttgggcgatcgatcagctcttcccaatcatgccgattcatcgtctgaatgaagagcctaatcagcgggtaacgcttgcagatctgacctgtgatagcgatggcaaaattgatcgctttattgacttgctagatgtcaaatctacgttagaacttcattcgctccagcccgaccaaccctacgttttagggatgtttttaggcggtgcctaccaagagattatgggtaatcttcataacctgtttggggataccaatgccgtccatatcaaactgacgcctaagggctacagcattgagcatgtggttaaaggtgacacgatgggcgaagtcttgggctatgtccaatacgatacggaacagcttctagaacgtctacgccagcaaactgaagctgctttgcaacaggatcaaatcagtttagatgaagcccagcggctgcttcgccattatgaagagggtctacagcggtatacctatctcagcttggattag

SEQ ID NO: 222 - DNA, 1131 bp, Synechococcus elongatus PCC7942
atgaggggggatttcgcaccgaacgaccgtacccaaacaaccgaagccgctaggctgaacaagggtctttttgctagtcaaatcatgagtcaggggcaacagagcgatcgccgttttccagcggaatgggaagcgcaggacggtgttttgattgcttggccccatgcggacagtgattggcgatcgctgttggatcaggtcgatcgcgtctaccgtgacctagcggaagcagtgacgcgctttgagcagttgctgatcgtgacgccagagcccgatcgcgtggcagaacaactggcgcagaccactgcgaattgcgatcgcattcagattgttgaactgcccaccaatgacacttggagccgcgattttgggccgctgacggtggaaaccccagcagggctgcgactgctggattggggcttcaatggctggggcctaaagtttgccgccaaccacgacaaccaagtgacacggcgactttggcagcaaggaatttttggcaccacgccgctggaaactgtgccgctgatttttgaagggggcagtatcgaaagtgatggacgcggcaccctactcaccacgagtcagtgtttgctggaagcgaatcgtaatccgggcttgagccgcgaggcgatcgcgcagatcatccagcgacaactggggggcgatcgcctgctctggttggagcatggccatttggaaggcgatgacacggacgcccacatcgacacgctggtgcggatcgcacctaatgacacgctgatttacgttgcctgcgacgatcccagtgacagtcatgcggcagaactaacagcccttgaagcagaactcaaagccttgcgcgcggcggacggacagccctaccacttgattcccttgccttggccgcaaccctgcttcgatgcggatggtcagcgcttgccgacaacctacgccaattacttagtcatcaatggcgcagtcttagtaccgacttacaacgatccggcagatgaggcggcgatcgcggcaatcgccgctgctttccccgatcgcctcgcgatcggcatcaactgtcggccactcctggagcaacatggctcactgcattgcatcacgatgcaactgcctgctggacttctcagtcgctaa

SEQ ID NO: 223 - DNA, 888 bp, Synechococcus elongatus PCC7942
atggcttcgacgttgcgtgtcgctctggctcaactggcatttagcgatcagccggtgatcgatcgcgatcgcgtgacagcagcgattcgggaagctgcagcagctggggcagaactgattgtgctgcccgagatccacggcggctactacttttgccagaccgaagatccagctcagtttgatcgcgccgagtccattccaggaccgagtacggactactacagcgcgatcgcccgagaactgtccgttgttctcatcctttcgctgtttgagcggcgggcagccggactctaccacaacactgctgtcgtgattgaacgggatggaacgatcgcgggtcgttaccgcaaaatgcacattcctgacgatccggcttactacgagaagttctacttcacgccgggcgacttggggtttgaaccgattcagacttcggtgggcaagttaggggttctggtctgctgggatcagtggtatcccgaagcagcgcgactgatggcgctggctggtgccgagttgctgatctatccgaccgcaatcggctgggatccgcaagacgtgcccgaggaacaacagcggcaactcgaagcttggcaaaccgtgcagcggggtcacgcaatcgccaatggaattcccgtgttgagtgtcaatcgggttggctttgaaccctcgcccgatccagctgctgcgggcagtcaattctggggcagcagtttcattgccgggccgcagggggaatggttagcaaaggctggcgatcgcgagccggaactgctgattgctgatctcgatcgcgatcgcagtgaacaggtgcggcggatctggcccttcctgcgcgatcgccgcatcgatgcctacggcgatttagtacgtcgctatcgagactaa

SEQ ID NO: 224 - DNA, 822 bp, Synechococcus elongatus
atgagtgaagcggggacgccagctgaggcgctgacctacgaacaagcgatcgcgaatctccgacagacagcagatacgggcgatcgctactacgcagcttggtggctgggtcggtttcggatgaagcagccagaggcgatcgcgctgttgattgaagccttagatgatagcctcgatcgcgcacctgatggcggctatcccctacggcgcaatgccgcacgcgcattgggaaaactggaaagtcctgaggcgatcgcaccgttgattgcctgcttgcagtgcgaggactactacgttcgcgaggctgcaacccagtccttaggtgagttgcaagccacagttgcggttccagcgttattgaaactgttagagggcggacctgaggcgatcgccgcgattccgggtaaaccccatctgactcagccagcggatgcggtgatggaaaccctgggacaactgcgagcaacggttgctgtccctgtggtgcaagcgtttctggagcatccgatcgataaaattcgcctagcagccgcacgatcgctctatcagctcaccggcgacgatcactatgctgagcgggttgttcaaggtttgagtgacccgaaattacagcgccggcggtcggccctgatggatttaggggcgatcggctatttgcccgctgcaccgcaaattgcccagacgcttgccgagaatagtctcaaactgatctcgctcaaagggctgctcgatactcatctgcggcaacagacccccgaggcgatcgcagagttggatgagtcggcaatcgcgctgatggatttgatggatggtttgctgtag

SEQ ID NO: 225 - DNA, 624 bp, Synococcus elongatus
atgagcacggaattgatcgctgctgttgaagccgctgattcggcggaaggactggtgcgggcggtagcggcactgtcggcggctcgtactgatgcggctatcccgactttgattagcgttttagcgttcaacaacccaggggctgcggtggttgcggtcgatggtctgattcaactgggttctccagcggcacaagccattctcaataatctggatgactataactacggcgcaagagcttgggctctgcgcgccttagctggcattggagaaccggcagccctgcccctgctcctgtcagcggcgcgggaagatttttcgctcagtgtgcggcgggcggcgacttacggcttggggcgagtgcgctgggcagatctgtccgagagcgatcgccttgcccaacaacagcagtgctatgaaaccctgaagctctgccttcagtacgatccggaatgggtggtgcgctatgcagcagcagcggcactggaaaccttagctccggctgcaacccagctccagtctgcgattgcagaaactctcaaccggcaggctcacagcgatgaggaacgagccgttcaggcgcgatcgcgtttagccgagcgacgcctagccgctggtgtataa

SEQ ID NO: 226 - DNA, 807 bp, Synococcus elongatus
atgtcggactggcagatggctgaggcctggaccctagaggaggcgatcgccaatatccaacaaacggaagatacaggtaaacgctattatgcggcttggtggtttggcaagttccgggtgcaggatgagcgggccgtaaatgcgttgctagcagcgttaaaagatgagacggatcggtcgccggatggaggttatcctctacgtcgaaacgcagcaaaggcgttgggcaagctgggcaatctggcagcggtgcaaccgttaattgagagtttagaaagtcctgattattatgtgcgggagtcggcggcccaatcgttggagatgttgggagatcggcaggcaattcctgcgttacaagcgctacttgcaggaggggttgcagcggcagtcaaggctgagggcaaaccccatttagtgcagccctatgaagcggtgattgaggcgttagggacgattggtgccacggcggcgatcgccgagattgagccatttttagatcatgaattcgcaaaaattcgctacgcagcactacgggccttatatcaactgacccaagaagcccattacgctgaacagttaatggaagccttgaatggtaaccagctacagttacgacggtctgcgctgttagatttgggtgctatcggctatgttccggcgggtcaggcgatcgccaaagcctatgccgaaaatagcttaaagttaatttccctcaagggcattctcgaatcccatttacaacggaccgccgaaaccctcgatgcggacggtttacaattgctcgaattaatggatagtctgctctag

SEQ ID NO: 227 - DNA, 642 bp, Synococcus elongatus
ttgcgatcgctaatttctgaacccatgaccgtcgacgttttaattcgtgccgttaacaaccccacttcagcccaagacctggtcaaaaatgtggcccaactcgccgcaacaaaagatgaacaagccattccaactctggtagaagtgctgaaatttaataatccgggggcggccgtcgcggcggtcaatggtctgatcaatattggcgaggccgttgtgccctacctcctcgaaaatgtcgatggctataactacggagcgcgggcatggatgctgcggatctttgccggaattggtgatcccagagctttagacctgctaattgaggcggcgaataaggattttgcctttagtgtgcggcgctctgcggccaaagggttagggaatattcaatggcataaagtgccagattctgagcgagaagtgcagcagcaaaaagtctgtgattgtctattcctggcccttgaagatggagaatgggtggttcgctatggggcgatcgccggactagagggtttgtcgcaagccattccagaagctagaaaaatcgtcatcaaaaacaaactcaccgaatttctcaccacagaaccagaagccgcaatccgtgcccgaatccaaaaagcaatcctgagtcttccgtga

SEQ ID NO: 228 - DNA, 4615 bp, Artificial Sequence
  pTJ014 Del_cpcE plasmid
gtgacccaatgcgaccagatgctccacgcccagtcgcgtaccgtcctcatgggagaaaataatactgttgatgggtgtctggtcagagacatcaagaaataacgccggaacattagtgcaggcagcttccacagcaatggcatcctggtcatccagcggatagttaatgatcagcccactgacgcgttgcgcgagaagattgtgcaccgccgctttacaggcttcgacgccgcttcgttctaccatcgacaccaccacgctggcacccagttgatcggcgcgagatttaatcgccgcgacaatttgcgacggcgcgtgcagggccagactggaggtggcaacgccaatcagcaacgactgtttgcccgccagttgttgtgccacgcggttgggaatgtaattcagctccgccatcgccgcttccactttttcccgcgttttcgcagaaacgtggctggcctggttcaccacgcgggaaacggtctgataagagacaccggcatactctgcgacatcgtataacgttactggtttcatattcaccaccctgaattgactctcttccgggcgctatcatgccataccgcgaaaggttttgcgccattcgatggcgcgccatgtccaagactcctctgaccgaagctgtcgctgctgctgattcgcaagggcgttttctgagcagcactgaactgcaagttgcatttggtcgtttccgtcaagctgcttctggtttggcagcggctaaggcgttggcaaacaatgctgacagcttggtcaacggtgcagcgaacgctgtttacagcaagttcccctacaccaccagcacgcctggcaacaactttgcatcgacgccggaaggcaaagcgaagtgtgcgcgtgacattggttactatctgcggattgtgacctatgcattggttgcgggtggcacgggtccgattgatgagtacctgttggcaggtcttgatgagatcaacaagaccttcgacttggcgccgagctggtatgtggaagcgctgaagtacatcaaagcgaatcatggcttgagtggtgactctcgcgatgaagccaactcctacatcgactacctcatcaatgccctcagctagtttttagctgctgcattgttcaagcccaggtctctcaggggagctgggcttccctttttaaatcagtgattttgtgagccgacttctggattagaaaaactcatcgagcatcaaatgaaactgcaatttattcatatcaggattatcaataccatatttttgaaaaagccgtttctgtaatgaaggagaaaactcaccgaggcagttccataggatggcaagatcctggtatcggtctgcgattccgactcgtccaacatcaatacaacctattaatttcccctcgtcaaaaataaggttatcaagtgagaaatcaccatgagtgacgactgaatccggtgagaatggcaaaagcttatgcatttctttccagacttgttcaacaggccagccattacgctcgtcatcaaaatcactcgcatcaaccaaaccgttattcattcgtgattgcgcctgagcgagacgaaatacgcgatcgctgttaaaaggacaattacaaacaggaatcgaatgcaaccggcgcaggaacactgccagcgcatcaacaatattttcacctgaatcaggatattcttctaatacctggaatgctgttttcccggggatcgcagtggtgagtaaccatgcatcatcaggagtacggataaaatgcttgatggtcggaagaggcataaattccgtcagccagtttagtctgaccatctcatctgtaacatcattggcaacgctacctttgccatgtttcagaaacaactctggcgcatcgggcttcccatacaatcgatagattgtcgcacctgattgcccgacattatcgcgagcccatttatacccatataaatcagcatccatgttggaatttaatcgcggcctcgagcaagacgtttcccgttgaatatggctcataacaccccttgtattactgtttatgtaagcagacagttttattgttcatgatgatatatttttatcttgtgcaatgtaacatcagagattttgagacacaacgtggctttgcacctatgagcacggaattgatcgctgctgttgaagccgctgattcggcggaaggactggtgcgggcggtagcggcactgtcggcggctcgtactgatgcggctatcccgactttgattagcgttttagcgttcaacaacccaggggctgcggtggttgcggtcgatggtctgattcaactgggttctccagcggcacaagccattctcaataatctggatgactataactacggcgcaagagcttgggctctgcgcgccttagctggcattggagaaccggcagccctgcccctgctcctgtcagcggcgcgggaagatttttcgctcagtgtgcggcgggcggcgacttacggcttggggcgagtgcgctgggcagatctgtccgagagcgatcgccttgcccaacaacagcagtgctatgaaaccctgaagctctgccttcagtacgatccggaatgggtggtgcgctatgcagcagcagcggcactggaaaccttagctccggctgcaacgcggccgcttcagcgaagggcgacacaaaatttattctaaatgcataataaatactgataacatcttatagtttgtattatattttgtattatcgttgacatgtataattttgatatcaaaaactgattttccctttattattttcgagatttattttcttaattctctttaacaaactagaaatattgtatatacaaaaaatcataaataatagatgaatagtttaattataggtgttcatcaatcgaaaaagcaacgtatcttatttaaagtgcgttgcttttttctcatttataaggttaaataattctcatatatcaagcaaagtgacaggcgcccttaaatattctgacaaatgctctttccctaaactccccccataaaaaaacccgccgaagcgggtttttacgttatttgcggattaacgattactcgttatcagaaccgcccagggggcccgagcttaagactggccgtcgttttacaacacagaaagagtttgtagaaacgcaaaaaggccatccgtcaggggccttctgcttagtttgatgcctggcagttccctactctcgccttccgcttcctcgctcactgactcgctgcgctcggtcgttcggctgcggcgagcggtatcagctcactcaaaggcggtaatacggttatccacagaatcaggggataacgcaggaaagaacatgtgagcaaaaggccagcaaaaggccaggaaccgtaaaaaggccgcgttgctggcgtttttccataggctccgcccccctgacgagcatcacaaaaatcgacgctcaagtcagaggtggcgaaacccgacaggactataaagataccaggcgtttccccctggaagctccctcgtgcgctctcctgttccgaccctgccgcttaccggatacctgtccgcctttctcccttcgggaagcgtggcgctttctcatagctcacgctgtaggtatctcagttcggtgtaggtcgttcgctccaagctgggctgtgtgcacgaaccccccgttcagcccgaccgctgcgccttatccggtaactatcgtcttgagtccaacccggtaagacacgacttatcgccactggcagcagccactggtaacaggattagcagagcgaggtatgtaggcggtgctacagagttcttgaagtggtgggctaactacggctacactagaagaacagtatttggtatctgcgctctgctgaagccagttaccttcggaaaaagagttggtagctcttgatccggcaaacaaaccaccgctggtagcggtggtttttttgtttgcaagcagcagattacgcgcagaaaaaaaggatctcaagaagatcctttgatcttttctacggggtctgacgctcagtggaacgacgcgcgcgtaactcacgttaagggattttggtcatgagtcactgcccgctttccagtcgggaaacctgtcgtgccagctgcattaatgaatcggccaacgcgcggggagaggcggtttgcgtattgggcgccagggtggtttttcttttcaccagtgagactggcaacagctgattgcccttcaccgcctggccctgagagagttgcagcaagcggtccacgctggtttgccccagcaggcgaaaatcctgtttgatggtggttaacggcgggatataacatgagctatcttcggtatcgtcgtatcccactaccgagatatccgcaccaacgcgcagcccggactcggtaatggcgcgcattgcgcccagcgccatctgatcgttggcaaccagcatcgcagtgggaacgatgccctcattcagcatttgcatggtttgttgaaaaccggacatggcactccagtcgccttcccgttccgctatcggctgaatttgattgcgagtgagatatttatgccagccagccagacgcagacgcgccgagacagaacttaatgggcccgctaacagcgcgatttgctg

1. A cell culture comprising modified Cyanobacteria that have an enhanced level of photosynthetic activity as compared to corresponding wild-type Cyanobacteria, wherein the modified Cyanobacteria have a reduced expression of phycocyanin genes or allophycocyanin genes as compared to the corresponding wild-type Cyanobacteria.

2. The cell culture of claim 1, wherein the reduced expression of the phycocyanin genes comprises the reduced expression of an endogenous cpcE gene as compared to the corresponding wild-type Cyanobacteria.

3. The cell culture of claim 1, wherein the modified Cyanobacteria have a reduced amount of a light harvesting (LHP) polypeptide as compared to the corresponding wild-type Cyanobacteria.

4. The cell culture of claim 1, wherein the modified cyanobacteria grow, divide or both at an increased rate as compared to the corresponding wild-type Cyanobacteria.

5. (canceled)

6. (canceled)

7. The cell culture of claim 1, wherein the modified Cyanobacteria have a reduced amount of phycobilisomes as compared to the corresponding wild-type Cyanobacteria.

8-11. (canceled)

12. The cell culture of claim 1, wherein the modified Cyanobacteria have a reduced level of a harvesting protein as compared to the corresponding wild-type Cyanobacteria.

13-20. (canceled)

21. The cell culture of claim 1, wherein the modified Cyanobacteria have a reduced amount of phycobiliproteins as compared to the corresponding wild-type Cyanobacteria.

22. The cell culture of claim 1, wherein the reduced expression of the phycocyanin genes or allophycocyanin genes comprises the reduced expression of endogenous phycocyanin genes or allophycocyanin genes as compared to the corresponding wild-type Cyanobacteria.

23. (canceled)

24. A method for generating modified Cyanobacteria, comprising:
i) modifying one or more polynucleotides associated with a light harvesting protein (LHP) of Cyanobacteria to generate the modified Cyanobacteria, wherein the modified cyanobacteria have a reduced amount of phycocyanin lyases as compared to the corresponding wild-type Cyanobacteria; or
(ii) culturing Cyanobacteria under a stress condition and isolating modified Cyanobacteria that have a reduced amount of phycocyanin lyases as compared to corresponding wild-type Cyanobacteria, wherein the stress condition comprises culturing under increased light, culturing in metronidazole containing growth media or both.

25. (canceled)

26. (canceled)

27. The method of claim 24, wherein the modified Cyanobacteria have an enhanced level of photosynthetic activity as compared to the corresponding wild-type Cyanobacteria.

28. (canceled)

29. (canceled)

30. The method of claim 24, wherein the modified Cyanobacteria have a reduced amount of phycobilisomes as compared to the corresponding wild-type Cyanobacteria.

31-42. (canceled)

43. The method of claim 24, wherein the modified Cyanobacteria have a reduced amount of phycobiliproteins as compared to the corresponding wild-type Cyanobacteria.

44. The method of claim 24, wherein the modified Cyanobacteria have a reduced expression of phycocyanin genes or allophycocyanin genes as compared to the corresponding wild-type Cyanobacteria.

45-56. (canceled)

57. A modified Cyanobacterium comprising a reduced amount of a light harvesting (LHP) polypeptide as compared to a corresponding wild-type Cyanobacterium.

58. (canceled)

59. The modified Cyanobacterium of claim 57, wherein the modified Cyanobacterium has a reduced amount of phycobilisomes as compared to the corresponding wild-type Cyanobacterium.

60-63. (canceled)

64. The modified Cyanobacterium of claim 57, wherein the modified Cyanobacterium has a reduced level of harvesting proteins as compared to the corresponding wild-type Cyanobacterium.

65-72. (canceled)

73. The modified Cyanobacterium of claim 57, wherein the modified Cyanobacterium has a reduced amount of phycobiliproteins as compared to the corresponding wild-type Cyanobacterium.

74. The modified Cyanobacterium of claim 57, wherein the modified Cyanobacterium has a reduced expression of phycocyanin genes or allophycocyanin genes as compared to the corresponding wild-type Cyanobacterium.

75. The modified Cyanobacterium of claim 74, wherein the reduced expression of the phycocyanin genes or allophycocyanin genes comprises the reduced expression of endogenous phycocyanin genes or allophycocyanin genes as compared to the corresponding wild-type Cyanobacterium.

76. The modified Cyanobacterium of claim 74, wherein the expression of the phycocyanin genes or allophycocyanin genes is reduced by replacing one or more promoters of the phycocyanin genes and allophycocyanin genes.

77-112. (canceled)
